(19) United States
(12) Patent Application Publication
(10) Pub. No.: US 2024/0415984 A1
(43) Pub. Date: Dec. 19, 2024

(54) Precise Excisions of Portions of Exons for Treatment of Duchenne Muscular Dystrophy

(71) Applicant: Vertex Pharmaceuticals Incorporated, Boston, MA (US)

(72) Inventors: Tudor Fulga, Boston, MA (US); Yi-Li Min, Boston, MA (US); Foram Ashar, Boston, MA (US); Su Wang, Boston, MA (US); Jianming Liu, Boston, MA (US)

(73) Assignee: Vertex Pharmaceuticals Incorporated, Boston, MA (US)

(21) Appl. No.: 18/826,876

(22) Filed: Sep. 6, 2024

Related U.S. Application Data
(63) Continuation of application No. PCT/US23/63884, filed on Mar. 7, 2023.
(60) Provisional application No. 63/317,819, filed on Mar. 8, 2022.

(51) Int. Cl. A61K 48/00; C12N 9/22; C12N 15/11; C12N 15/90

(52) U.S. Cl. CPC A61K 48/0058; C12N 9/22; C12N 15/11; C12N 15/907; C12N 2310/20

(57) ABSTRACT

Compositions and methods for treating Duchenne Muscular Dystrophy (DMD) and excising small portions of exons of the DMD gene are encompassed.

[0001] This application is a bypass continuation of PCT/US2023/63884, filed Mar. 7, 2023, which claims the benefit of priority to U.S. Provisional Application No. 63/317,819, filed Mar. 8, 2022, both of which are incorporated herein by reference in its entirety.

[0002] The instant application contains a Sequence Listing which has been submitted electronically in XML format and is hereby incorporated by reference in its entirety. Said XML copy, created on Mar. 6, 2023, is named 01245-0035-00PCT_Sequence_Listing and is 5,435,392 bytes in size.

### INTRODUCTION AND SUMMARY

[0003] Muscular dystrophies (MD) are a group of more than 30 genetic diseases characterized by progressive weakness and degeneration of the skeletal muscles that control movement. Duchenne muscular dystrophy (DMD) is one of the most severe forms of MD that affects approximately 1 in 5000 boys and is characterized by progressive muscle weakness and premature death. Cardiomyopathy and heart failure are common, incurable and lethal features of DMD. The disease is caused by mutations in the gene encoding dystrophin (DMD), which result in loss of expression of dystrophin, causing muscle membrane fragility and progressive muscle wasting.

[0004] CRISPR-based genome editing can provide sequence-specific cleavage of genomic DNA using a Cas9 and a guide RNA. For example, a nucleic acid encoding the Cas9 enzyme and a nucleic acid encoding for the appropriate guide RNA can be provided on separate vectors or together on a single vector and administered in vivo or in vitro to knockout or correct a genetic mutation, for example. The approximately 20 nucleotides at the 5′ end of the guide RNA serves as the guide or spacer sequence that can be any sequence complementary to one strand of a genomic target location that has an adjacent protospacer adjacent motif (PAM). The PAM sequence is a short sequence adjacent to the Cas9 nuclease cut site that the Cas9 molecule requires for appropriate binding. The nucleotides 3′ of the guide or spacer sequence of the guide RNA serve as a scaffold sequence for interacting with Cas9. When a guide RNA and a Cas9 are expressed, the guide RNA will bind to Cas9 and direct it to the sequence complementary to the guide sequence, where it will then initiate a double-stranded break (DSB). To repair these breaks, cells typically use an error prone mechanism of non-homologous end joining (NHEJ) which can lead to disruption of function in the target gene through insertions or deletion of codons, shifts in the reading frame, or result in a premature stop codon triggering nonsense-mediated decay. See, e.g., Kumar et al. (2018) Front. Mol. Neurosci. Vol. 11, Article 413.

[0005] While gene editing strategies using systems (e.g., CRISPR) for treating DMD have been previously explored, these strategies have focused primarily on either: a) cutting at multiple different sites to excise large portions (e.g., one or more exons) of the dystrophin gene (see, e.g., Ousterout et al., 2015, Nat Commun. 6:6244); or b) cutting in a single site to introduce indels that either result in a frame-shifting mutation and/or that destroy a splice acceptor/donor site in the dystrophin gene (see, e.g., Amoassi et al., 2018, Science, 362(6410):86-91). However, there remains a need for additional alternative and effective gene editing strategies for treating diseases like DMD.

[0006] Provided herein are compositions and methods for treating DMD utilizing Cas proteins such as Staphylococcus aureus (SaCas9) and Staphylococcus lugdunensis (SluCas9). In some embodiments, pairs of guide RNAs that excise small portions of the DMD gene are provided, where the nucleic acid encoding the pairs of guide RNAs may be on a single nucleic acid molecule.

[0007] Accordingly, the following non-limiting embodiments are provided.
[0008] Embodiment 1 is a composition comprising one or more guide RNAs or a nucleic acid encoding one or more guide RNAs, wherein the guide RNAs comprise i) a guide sequence of Table 1A or Table 1B; ii) at least 16, 17, 18, 19, or 20 contiguous nucleotides of a guide sequence of Table 1A or Table 1B; iii) a guide sequence that is at least 90% identical to a guide sequence of Table 1A or Table 1B; optionally further comprising a SaCas9 or a nucleic acid encoding a SaCas9 (for SEQ ID NOs: 1000-3081 in Table 1A) or a SluCas9 or a nucleic acid encoding a SluCas9 (for SEQ ID NOs 4000-5226 in Table 1B).
[0009] Embodiment 2 is a composition comprising a pair of guide RNAs or a nucleic acid encoding a pair of guide RNAs, wherein the pair of guide RNAs comprise a first and a second guide sequence, wherein the first and second guide sequences are selected from any two guide sequences of Table 1A or any two guide sequences of Table 1B.
[0010] Embodiment 3 is a composition comprising: one or more nucleic acid molecules encoding
   [0011] a. a SaCas9 or SluCas9; and
   [0012] b. a first guide sequence and a second guide sequence, wherein the first and second guide sequence are selected from any two guide sequences of Table 1A or any two guide sequences of Table 1B.
[0013] Embodiment 4 is a composition comprising:
   [0014] a. a single nucleic acid molecule comprising:
      [0015] i. a nucleic acid encoding Staphylococcus aureus Cas9 (SaCas9) or Staphylococcus lugdunensis (SluCas9) and at least one, at least two, or at least three guide RNAs; or
      [0016] ii. a nucleic acid encoding Staphylococcus aureus Cas9 (SaCas9) or Staphylococcus lugdunensis (SluCas9) and from one to n guide RNAs, wherein n is no more than the maximum number of guide RNAs that can be expressed from said nucleic acid; or
      [0017] iii. a nucleic acid encoding Staphylococcus aureus Cas9 (SaCas9) or Staphylococcus lugdunensis (SluCas9) and 1, 2, or 3 guide RNAs;
[0018] wherein each guide RNA comprises at least one guide sequence of Table 1A or Table 1B; or
   [0019] b. two nucleic acid molecules comprising:
      [0020] i. a first nucleic acid encoding Staphylococcus aureus Cas9 (SaCas9) or Staphylococcus lugdunensis (SluCas9); and
         [0021] 1. a second nucleic acid that does not encode a SaCas9 or SluCas9 and encodes any one of the following:
         [0022] 2. at least one, at least two, at least three, at least four, at least five, or at least six guide RNAs; or
         [0023] 3. from one to n guide RNAs, wherein n is no more than the maximum number of guide RNAs that can be expressed from said nucleic acid; or
         [0024] 4. from one to six guide RNAs; or
      [0025] ii. a first nucleic acid encoding Staphylococcus aureus Cas9 (SaCas9) or Staphylococcus lugdunensis (SluCas9) and
         [0026] 1. at least one, at least two, or at least three guide RNAs; or
         [0027] 2. from one to n guide RNAs, wherein n is no more than the maximum number of guide RNAs that can be expressed from said nucleic acid; or
         [0028] 3. 1, 2, or 3 guide RNAs; and
      [0029] a second nucleic acid that does not encode a SaCas9 or SluCas9, optionally wherein the second nucleic acid comprises any one of the following:
         [0030] 1. at least one, at least two, at least three, at least four, at least five, or at least six guide RNAs; or
         [0031] 2. from one to n guide RNAs, wherein n is no more than the maximum number of guide RNAs that can be expressed from said nucleic acid; or
         [0032] 3. from one to six guide RNAs; or
      [0033] iii. a first nucleic acid encoding Staphylococcus aureus Cas9 (SaCas9) or Staphylococcus lugdunensis (SluCas9) and at least one, at least two, or at least three guide RNAs; and
         [0034] a second nucleic acid that does not encode a SaCas9 or SluCas9 and encodes from one to six guide RNAs; or
      [0035] iv. a first nucleic acid encoding Staphylococcus aureus Cas9 (SaCas9) or Staphylococcus lugdunensis (SluCas9) and at least two guide RNAs, wherein at least one guide RNA binds upstream of a target sequence and at least one guide RNA binds downstream of the target sequence; and
         [0036] a second nucleic acid that does not encode a SaCas9 or SluCas9 and encodes at least one additional copy of each of the guide RNAs encoded in the first nucleic acid;
[0037] wherein each guide RNA comprises at least one guide sequence of Table 1A (for SaCas9) or Table 1B (for SluCas9).

[0038] Embodiment 5 is the composition of any one of embodiments 1-4, comprising a pair of guide RNAs, wherein the pair of guide RNAs are capable of excising a DNA fragment from the DMD gene; wherein the DNA fragment is between 5-250 nucleotides in length.
[0039] Embodiment 6 is the composition of embodiment 5, wherein the excised DNA fragment does not comprise an entire exon of the DMD gene.
[0040] Embodiment 7 is a composition comprising a single nucleic acid molecule encoding a pair of guide RNAs and a Cas9, wherein the single nucleic acid molecule comprises:
   [0041] a. a first nucleic acid encoding a pair of guide RNAs comprising a first and second spacer sequence, wherein the first and second spacer sequences are selected from any two spacer sequences of SEQ ID NOs: 1000-3081; and a second nucleic acid encoding a Staphylococcus aureus Cas9 (SaCas9); or
   [0042] b. a first nucleic acid encoding a pair of guide RNAs comprising a first and second spacer sequence, wherein the first and second spacer sequences are selected from any two spacer sequences of SEQ ID NOs: 4000-5226; and a second nucleic acid encoding a Staphylococcus lugdunensis (SluCas9).
[0043] Embodiment 8 is a composition comprising one or more nucleic acid molecules encoding a Staphylococcus aureus Cas9 (SaCas9) and a first and a second guide RNA, wherein the first and second guide RNA target different sequences in a DMD gene, wherein the first and a second guide RNA each comprise a sequence that is at least 90% identical to a first and second spacer sequence, wherein the first and second spacer sequences are selected from any two space sequences of Table 1A.
[0044] Embodiment 9 is a composition comprising one or more nucleic acid molecules encoding a Staphylococcus lugdunensis (SluCas9) and a first and a second guide RNA, wherein the first and second guide RNA target different sequences in a DMD gene, wherein the first and a second guide RNA each comprise a sequence that is at least 90% identical to a first and second spacer sequence, wherein the first and second spacer sequences are selected from any two spacer sequences of Table 1B.
[0045] Embodiment 10 is the composition of any one of the preceding embodiments, comprising at least two guide RNAs, wherein once expressed in vitro or in vivo in combination with an RNA-guided endonuclease, the guide RNAs excise a portion of the exon, wherein the size of the excised portion of the exon is between 5 and 250 nucleotides in length.
[0046] Embodiment 11 is the composition of any one of the preceding embodiments, comprising at least two guide RNAs, wherein once expressed in vitro or in vivo in combination with an RNA-guided endonuclease, the guide RNAs excise a portion of the exon, wherein the size of the excised portion of the exon is between 5 and 250, 5 and 200, 5 and 150, 5 and 100, 5 and 75, 5 and 50, 5 and 25, 5 and 10, 20 and 250, 20 and 200, 20 and 150, 20 and 100, 20 and 75, 20 and 50, 20 and 25, 50 and 250, 50 and 200, 50 and 150, 50 and 100, and 50 and 75 nucleotides.
[0047] Embodiment 12 is the composition of any one of the preceding embodiments, comprising at least two guide RNAs, wherein once expressed in vitro or in vivo in combination with an RNA-guided endonuclease, the guide RNAs excise a portion of the exon, wherein the size of the excised portion of the exon is between 8 and 167 nucleotides.
[0048] Embodiment 13 is the composition of any one of the preceding embodiments, wherein the guide RNA is an sgRNA.
[0049] Embodiment 14 is the composition of any one of the preceding embodiments, wherein the guide RNA is modified.
[0050] Embodiment 15 is the composition of any one of the preceding embodiments, wherein the one or more guide RNAs or nucleic acids are in a vector.
[0051] Embodiment 16 is the composition of embodiment 15, wherein the vector is a viral vector.
[0052] Embodiment 17 is the composition of embodiment 16, wherein the viral vector is an AAV vector.
[0053] Embodiment 18 is the composition of embodiment 17, wherein the AAV vector is an AAV9 vector.
[0054] Embodiment 19 is the composition of any one of the preceding embodiments, wherein the promoter for the one or more guide RNAs is hU6c.
[0055] Embodiment 20 is the composition of any one of the preceding embodiments, wherein if the one or more guide RNAs is a guide RNA for SaCas9, the one or more guide RNAs comprise a scaffold comprising the sequence of SEQ ID NO: 504.
[0056] Embodiment 21 is the composition of any one of the preceding embodiments, wherein if the one or more guide RNAs is a guide RNA for SluCas9, the one or more guide RNAs comprise a scaffold comprising the sequence of SEQ ID NO: 901.
[0057] Embodiment 22 is the composition of any one of the preceding embodiments, wherein the one or more guide RNAs are in an AAV vector, wherein the vector comprises from 5′ to 3′ with respect to the plus strand: the reverse complement of a first guide RNA scaffold sequence; the reverse complement of a nucleic acid encoding a first guide RNA guide sequence; the reverse complement of a promoter for expression of the nucleic acid encoding the first guide RNA; a promoter (e.g., CK8e) for expression of a nucleic acid encoding a SaCas9, SluCas9, or a sRGN; a nucleic acid encoding a SaCas9, SluCas9, or a sRGN, a polyadenylation sequence; a promoter for expression of a second sgRNA in the same direction as the promoter for SaCas9, SluCas9, or the sRGN; a second sgRNA guide sequence; and a second sgRNA scaffold sequence.
[0058] Embodiment 23 is the composition of any one of the preceding embodiments, wherein the composition comprises a pair of guide RNAs, wherein the first and second guide RNAs in the pair target the same exon in the dystrophin gene.
[0059] Embodiment 24 is the composition of embodiment 23, wherein the first guide RNA and the second guide RNA are not the same.
[0060] Embodiment 25 is the composition of embodiment 23, wherein the first guide RNA targets a different site in the same exon targeted by the second guide RNA.
[0061] Embodiment 26 is the composition of embodiment 23, wherein the exon is selected from the group consisting of exons: 1, 2, 3, 4, 5, 6, 7, 8, 9, 10, 11, 12, 13, 14, 15, 16, 17, 18, 19, 20, 21, 22, 23, 24, 25, 26, 27, 28, 29, 30, 31, 32, 33, 34, 35, 36, 37, 38, 39, 40, 41, 42, 43, 46, 47, 48, 49, 52, 54, 55, 56, 57, 58, 59, 60, 61, 62, 63, 64, 65, 66, 67, 68, 69, 70, 71, 72, 73, 74, 75, 76, 77, 78, or 79 of the dystrophin gene.
[0062] Embodiment 27 is a composition of any one of claims 1-26, wherein the one or more guide RNA sequences, or the first and/or second guide RNA sequence of the pair of guide RNAs, is no more than 16, no more than 17, no more than 18, no more than 19, no more than 20, no more than 21, or no more than 22 nucleotides in length.
[0063] Embodiment 28 is a method of treating Duchenne Muscular Dystrophy (DMD), the method comprising delivering to a cell a composition of any one of embodiments 1-27.
[0064] Embodiment 29 is a method of excising a portion of the DMD gene, the method comprising delivering to a cell a composition of any one of embodiments 1-27, wherein the size of the excised portion is less than about 250 nucleotides.

### DESCRIPTION OF FIGURES

[0065] FIG. 1 is a schematic showing four representative vector designs (Designs 1-4). White arrows indicate directionality of expression of the sgRNA(s), while the black arrows indicate directionality of the Cas9 protein. In a particular embodiment, the Cas9 promoter may be CK8e. “Pol III” refers to a representative promoter for the expression of sgRNAs, “g1” and “g2” each refer to a guide sequence, “scaffold” refers to the scaffold of a guide RNA, and “pa” refers to a polyadenylation sequence.

### DETAILED DESCRIPTION

[0066] Reference will now be made in detail to certain embodiments of the invention, examples of which are illustrated in the accompanying drawings. While the invention is described in conjunction with the illustrated embodiments, it will be understood that they are not intended to limit the invention to those embodiments. On the contrary, the invention is intended to cover all alternatives, modifications, and equivalents, which may be included within the invention as defined by the appended claims and included embodiments.

[0067] Before describing the present teachings in detail, it is to be understood that the disclosure is not limited to specific compositions or process steps, as such may vary. It should be noted that, as used in this specification and the appended claims, the singular form “a”, “an” and “the” include plural references unless the context clearly dictates otherwise. Thus, for example, reference to “a guide” includes a plurality of guides and reference to “a cell” includes a plurality of cells and the like.

[0068] Numeric ranges are inclusive of the numbers defining the range. Measured and measurable values are understood to be approximate, taking into account significant digits and the error associated with the measurement. Also, the use of “comprise”, “comprises”, “comprising”, “contain”, “contains”, “containing”, “include”, “includes”, and “including” are not intended to be limiting. It is to be understood that both the foregoing general description and detailed description are exemplary and explanatory only and are not restrictive of the teachings.

[0069] Unless specifically noted in the specification, embodiments in the specification that recite “comprising” various components are also contemplated as “consisting of” or “consisting essentially of” the recited components; embodiments in the specification that recite “consisting of” various components are also contemplated as “comprising” or “consisting essentially of” the recited components; and embodiments in the specification that recite “consisting essentially of” various components are also contemplated as “consisting of” or “comprising” the recited components (this interchangeability does not apply to the use of these terms in the claims). The term “or” is used in an inclusive sense, i.e., equivalent to “and/or,” unless the context clearly indicates otherwise.

[0070] The section headings used herein are for organizational purposes only and are not to be construed as limiting the desired subject matter in any way. In the event that any material incorporated by reference contradicts any term defined in this specification or any other express content of this specification, this specification controls. While the present teachings are described in conjunction with various embodiments, it is not intended that the present teachings be limited to such embodiments. On the contrary, the present teachings encompass various alternatives, modifications, and equivalents, as will be appreciated by those of skill in the art.

### I. Definitions

[0071] Unless stated otherwise, the following terms and phrases as used herein are intended to have the following meanings:

[0072] “Polynucleotide,” “nucleic acid,” and “nucleic acid molecule,” are used herein to refer to a multimeric compound comprising nucleosides or nucleoside analogs which have nitrogenous heterocyclic bases or base analogs linked together along a backbone, including conventional RNA, DNA, mixed RNA-DNA, and polymers that are analogs thereof. A nucleic acid “backbone” can be made up of a variety of linkages, including one or more of sugar-phosphodiester linkages, peptide-nucleic acid bonds (“peptide nucleic acids” or PNA; PCT No. WO 95/32305), phosphorothioate linkages, methylphosphonate linkages, or combinations thereof. Sugar moieties of a nucleic acid can be ribose, deoxyribose, or similar compounds with substitutions, e.g., 2′ methoxy or 2′ halide substitutions. Nitrogenous bases can be conventional bases (A, G, C, T, U), analogs thereof (e.g., modified uridines such as 5-methoxyuridine, pseudouridine, or N1-methylpseudouridine, or others); inosine; derivatives of purines or pyrimidines (e.g., N⁴-methyl deoxyguanosine, deaza- or aza-purines, deaza- or aza-pyrimidines, pyrimidine bases with substituent groups at the 5 or 6 position (e.g., 5-methylcytosine), purine bases with a substituent at the 2, 6, or 8 positions, 2-amino-6-methylaminopurine, O⁶-methylguanine, 4-thio-pyrimidines, 4-amino-pyrimidines, 4-dimethylhydrazine-pyrimidines, and O⁴-alkyl-pyrimidines; U.S. Pat. No. 5,378,825 and PCT No. WO 93/13121). For general discussion see The Biochemistry of the Nucleic Acids 5-36, Adams et al., ed., 11^{th} ed., 1992). Nucleic acids can include one or more “abasic” residues where the backbone includes no nitrogenous base for position(s) of the polymer (U.S. Pat. No. 5,585,481). A nucleic acid can comprise only conventional RNA or DNA sugars, bases and linkages, or can include both conventional components and substitutions (e.g., conventional bases with 2′ methoxy linkages, or polymers containing both conventional bases and one or more base analogs). Nucleic acid includes “locked nucleic acid” (LNA), an analogue containing one or more LNA nucleotide monomers with a bicyclic furanose unit locked in an RNA mimicking sugar conformation, which enhance hybridization affinity toward complementary RNA and DNA sequences (Vester and Wengel, 2004, Biochemistry 43(42):13233-41). RNA and DNA have different sugar moieties and can differ by the presence of uracil or analogs thereof in RNA and thymine or analogs thereof in DNA.

[0073] “Guide RNA” and simply “guide” are used herein interchangeably to refer to either a crRNA (also known as CRISPR RNA), or the combination of a crRNA and a trRNA (also known as tracrRNA). The crRNA and trRNA may be associated as a single RNA molecule (single guide RNA, sgRNA) or in two separate RNA molecules (dual guide RNA, dgRNA). “Guide RNA” refers to each type. The trRNA may be a naturally-occurring sequence, or a trRNA sequence with modifications or variations compared to naturally-occurring sequences. For clarity, the terms “guide RNA” or “guide” as used herein, and unless specifically stated otherwise, may refer to an RNA molecule (comprising A, C, G, and U nucleotides) or to a DNA molecule encoding such an RNA molecule (comprising A, C, G, and T nucleotides) or complementary sequences thereof. In general, in the case of a DNA nucleic acid construct encoding a guide RNA, the U residues in any of the RNA sequences described herein may be replaced with T residues, and in the case of a guide RNA construct encoded by any of the DNA sequences described herein, the T residues may be replaced with U residues.

[0074] As used herein, a “spacer sequence,” sometimes also referred to herein and in the literature as a “spacer,” “protospacer,” “guide sequence,” or “targeting sequence” refers to a sequence within a guide RNA that is complementary to a target sequence and functions to direct a guide RNA to a target sequence for cleavage by a Cas9. For clarity, the terms “spacer sequence”, “spacer,” “protospacer,” “guide sequence,” or “targeting sequence” as used herein, and unless specifically stated otherwise, may refer to an RNA molecule (comprising A, C, G, and U nucleotides) or to a DNA molecule encoding such an RNA molecule (comprising A, C, G, and T nucleotides) or complementary sequences thereof. A guide sequence can be 24, 23, 22, 21, 20 or fewer base pairs in length, e.g., in the case of Staphylococcus lugdunensis (i.e., SluCas9) or Staphylococcus aureus (i.e., SaCas9) and related Cas9 homologs/orthologs. In preferred embodiments, a guide/spacer sequence in the case of SluCas9 or SaCas9 is at least 20 base pairs in length, or more specifically, within 20-25 base pairs in length (see, e.g., Schmidt et al., 2021, Nature Communications, “Improved CRISPR genome editing using small highly active and specific engineered RNA-guided nucleases”). Shorter or longer sequences can also be used as guides, e.g., 15-, 16-, 17-, 18-, 19-, 20-, 21-, 22-, 23-, 24-, or 25-nucleotides in length. For example, in some embodiments, the guide sequence comprises at least 16, 17, 18, 19, 20, 21, 22, 23, 24, or 25 contiguous nucleotides of a sequence selected from SEQ ID NOs: 1000-3081 (for SaCas9, including SaCas9KKH), and 4000-5226 (for SluCas9). In some embodiments, the guide sequence comprises a sequence selected from SEQ ID NOs: 1000-3081 or 4000-5226. In some embodiments, the target sequence is in a gene or on a chromosome, for example, and is complementary to the guide sequence. In some embodiments, the degree of complementarity or identity between a guide sequence and its corresponding target sequence may be about 75%, 80%, 85%, 90%, 95%, 96%, 97%, 98%, 99%, or 100%. For example, in some embodiments, the guide sequence comprises a sequence with about 75%, 80%, 85%, 90%, 95%, 96%, 97%, 98%, 99%, or 100% identity to at least 16, 17, 18, 19, 20, 21, 22, 23, 24, or 25 contiguous nucleotides of a sequence selected from SEQ ID NOs: 1000-3081 or 4000-5226. In some embodiments, the guide sequence comprises a sequence with about 75%, 80%, 85%, 90%, 95%, 96%, 97%, 98%, 99%, or 100% identity to a sequence selected from SEQ ID NOs: 1000-3081 or 4000-5226. In some embodiments, the guide sequence and the target region may be 100% complementary or identical. In other embodiments, the guide sequence and the target region may contain at least one mismatch. For example, the guide sequence and the target sequence may contain 1, 2, 3, or 4 mismatches, where the total length of the target sequence is at least 16, 17, 18, 19, 20 or more base pairs. In some embodiments, the total length of the target sequence/guide is not more than 16, no more than 17, no more than 18, no more than 19, no more than 20, no more than 22, no more than 23, or no more than 24 nucleotides in length. In some embodiments, the guide sequence and the target region may contain 1-4 mismatches where the guide sequence comprises at least 16, 17, 18, 19, 20 or more nucleotides. In some embodiments, the guide sequence and the target region may contain 1, 2, 3, or 4 mismatches where the guide sequence comprises 20 nucleotides. In some embodiments, the guide sequence and the target region do not contain any mismatches.

[0075] In some embodiments, the guide sequence comprises a sequence selected from SEQ ID NOs: 1000-3081 or 4000-5226, wherein if the 5′ terminal nucleotide is not guanine, one or more guanine (g) is added to the sequence at its 5′ end. In some embodiments, the 5′ g or gg is included in some instances for transcription, for example, for expression by the RNA polymerase III-dependent U6 promoter or the T7 promoter. In some embodiments, a 5′ guanine is added to any one of the guide sequences or pairs of guide sequences disclosed herein.

[0076] Target sequences for Cas9s include both the positive and negative strands of genomic DNA (i.e., the sequence given and the sequence's reverse compliment), as a nucleic acid substrate for a Cas9 is a double stranded nucleic acid. Accordingly, where a guide sequence is said to be “complementary to a target sequence”, it is to be understood that the guide sequence may direct a guide RNA to bind to the reverse complement of a target sequence. Thus, in some embodiments, where the guide sequence binds the reverse complement of a target sequence, the guide sequence is identical to certain nucleotides of the target sequence (e.g., the target sequence not including the PAM) except for the substitution of U for T in the guide sequence.

[0077] As used herein, “ribonucleoprotein” (RNP) or “RNP complex” refers to a guide RNA together with a Cas9. In some embodiments, the guide RNA guides the Cas9, such as a SluCas9 or a SaCas9, to a target sequence, and the guide RNA hybridizes with and the agent binds to the target sequence, which can be followed by cleaving or nicking (in the context of a modified “nickase” Cas9).

[0078] As used herein, a first sequence is considered to “comprise a sequence with at least X % identity to” a second sequence if an alignment of the first sequence to the second sequence shows that X % or more of the positions of the second sequence in its entirety are matched by the first sequence. For example, the sequence AAGA comprises a sequence with 100% identity to the sequence AAG because an alignment would give 100% identity in that there are matches to all three positions of the second sequence. The differences between RNA and DNA (generally the exchange of uridine for thymidine or vice versa) and the presence of nucleoside analogs such as modified uridines do not contribute to differences in identity or complementarity among polynucleotides as long as the relevant nucleotides (such as thymidine, uridine, or modified uridine) have the same complement (e.g., adenosine for all of thymidine, uridine, or modified uridine; another example is cytosine and 5-methylcytosine, both of which have guanosine or modified guanosine as a complement). Thus, for example, the sequence 5′-AXG where X is any modified uridine, such as pseudouridine, N1-methyl pseudouridine, or 5-methoxyuridine, is considered 100% identical to AUG in that both are perfectly complementary to the same sequence (5′-CAU). Exemplary alignment algorithms are the Smith-Waterman and Needleman-Wunsch algorithms, which are well-known in the art. One skilled in the art will understand what choice of algorithm and parameter settings are appropriate for a given pair of sequences to be aligned; for sequences of generally similar length and expected identity >50% for amino acids or >75% for nucleotides, the Needleman-Wunsch algorithm with default settings of the Needleman-Wunsch algorithm interface provided by the EBI at the www.ebi.ac.uk web server is generally appropriate.

[0079] “mRNA” is used herein to refer to a polynucleotide that is not DNA and comprises an open reading frame that can be translated into a polypeptide (i.e., can serve as a substrate for translation by a ribosome and amino-acylated tRNAs). mRNA can comprise a phosphate-sugar backbone including ribose residues or analogs thereof, e.g., 2′-methoxy ribose residues. In some embodiments, the sugars of an mRNA phosphate-sugar backbone consist essentially of ribose residues, 2′-methoxy ribose residues, or a combination thereof.

[0080] Guide sequences useful in the guide RNA compositions and methods described herein are shown, for example, in Tables 1A-1B, and throughout the specification.

[0081] As used herein, a “target sequence” refers to a sequence of nucleic acid in a target gene that has complementarity to at least a portion of the guide sequence of the guide RNA. The interaction of the target sequence and the guide sequence directs a Cas9 to bind, and potentially nick or cleave (depending on the activity of the agent), within or near the target sequence.

[0082] As used herein, “treatment” refers to any administration or application of a therapeutic for disease or disorder in a subject, and includes inhibiting the disease or development of the disease (which may occur before or after the disease is formally diagnosed, e.g., in cases where a subject has a genotype that has the potential or is likely to result in development of the disease), arresting its development, relieving one or more symptoms of the disease, curing the disease, or preventing reoccurrence of one or more symptoms of the disease. For example, treatment of DMD may comprise alleviating symptoms of DMD.

[0083] As used herein, “ameliorating” refers to any beneficial effect on a phenotype or symptom, such as reducing its severity, slowing or delaying its development, arresting its development, or partially or completely reversing or eliminating it. In the case of quantitative phenotypes such as expression levels, ameliorating encompasses changing the expression level so that it is closer to the expression level seen in healthy or unaffected cells or individuals.

[0084] A “pharmaceutically acceptable excipient” refers to an agent that is included in a pharmaceutical formulation that is not the active ingredient. Pharmaceutically acceptable excipients may e.g., aid in drug delivery or support or enhance stability or bioavailability.

[0085] The term “about” or “approximately” means an acceptable error for a particular value as determined by one of ordinary skill in the art, which depends in part on how the value is measured or determined.

[0086] As used herein, “Staphylococcus aureus Cas9” may also be referred to as SaCas9, and includes wild type SaCas9 (e.g., SEQ ID NO: 711) and variants thereof. A variant of SaCas9 comprises one or more amino acid changes as compared to SEQ ID NO: 711, including insertion, deletion, or substitution of one or more amino acids, or a chemical modification to one or more amino acids. For clarity, SaCas9KKH is a SaCas9 variant.

[0087] As used herein, “Staphylococcus lugdunensis Cas9” may also be referred to as SluCas9, and includes wild type SluCas9 (e.g., SEQ ID NO: 712) and variants thereof. A variant of SluCas9 comprises one or more amino acid changes as compared to SEQ ID NO: 712, including insertion, deletion, or substitution of one or more amino acids, or a chemical modification to one or more amino acids.

### II. Compositions

[0088] Provided herein are compositions comprising guide RNAs and pairs of guide RNAs useful for treating Duchenne Muscular Dystrophy (DMD). The provided pairs of guide RNAs, when used with the correct endonuclease, function to precisely delete a small portion (e.g., less than about 250 nucleotides) of exon 1, 2, 3, 4, 5, 6, 7, 8, 9, 10, 11, 12, 13, 14, 15, 16, 17, 18, 19, 20, 21, 22, 23, 24, 25, 26, 27, 28, 29, 30, 31, 32, 33, 34, 35, 36, 37, 38, 39, 40, 41, 42, 43, 46, 47, 48, 49, 52, 54, 55, 56, 57, 58, 59, 60, 61, 62, 63, 64, 65, 66, 67, 68, 69, 70, 71, 72, 73, 74, 75, 76, 77, 78, or 79 of the DMD gene. Tables 1A-B provides a listing of guide sequences of guide RNAs, including detailed information regarding these sequences.

### Guides and Guide Pairs

TABLE 1A
Sa guide sequences (human-hg38.12)

| | Guide ID | | | | | |
|---|---|---|---|---|---|---|
| Seq ID No. | or Guide RNA Name | exon_id | enzyme | strand | Guide Sequence | pam |
| 1000 | E1Sa1 | exon1 | SaCas9 | + | CGAAGGTAATTGCCTCCCAGAT | CTGAGT |
| 1001 | E1Sa2 | exon1 | SaCas9 | + | ATCTGAGTCCTGTAGGGGGAAA | GTGAGT |
| 1002 | E1Sa5 | exon1 | SaCas9 | − | AGGCAATTACCTTCGGAGAAAA | ACGAAT |
| 1003 | E2Sa1 | exon2 | SaCas9 | + | AAATTGTGCATTTACCCATTTT | GTGAAT |
| 1004 | E2Sa2 | exon2 | SaCas9 | − | TAAATGCACAATTTTCTAAGGT | AAGAAT |
| 1005 | E2Sa3 | exon2 | SaCas9 | − | TTCAAAAGAAAACATTCACAAA | ATGGGT |
| 1006 | E3Sa1 | exon3 | SaCas9 | − | TGAGAACCTCTTCAGTGACCTA | CAGGAT |
| 1007 | E4Sa1 | exon4 | SaCas9 | + | ATTGTTCAGGGCATGAACTCTT | GTGGAT |
| 1008 | E4Sa4 | exon4 | SaCas9 | − | TGAACAATGTCAACAAGGCACT | GCGGGT |
| 1009 | E4Sa5 | exon4 | SaCas9 | − | AGCCAAAAGAAAAAGGATCCAC | AAGAGT |
| 1010 | E4Sa6 | exon4 | SaCas9 | − | TTTTGTTCTCAGCCAAAAGAAA | AAGGAT |
| 1011 | E5Sa1 | exon5 | SaCas9 | + | TCAGGATTCTTACCTGCCAGTG | GAGGAT |
| 1012 | E5Sa2 | exon5 | SaCas9 | + | GGATTATATTCCAAATCAAACC | AAGAGT |
| 1013 | E5Sa5 | exon5 | SaCas9 | − | ATATAATCCTCCACTGGCAGGT | AAGAAT |
| 1014 | E5Sa6 | exon5 | SaCas9 | − | TAAACTGACTCTTGGTTTGATT | TGGAAT |
| 1015 | E5Sa7 | exon5 | SaCas9 | − | CTTTCTTTAACAGGTTGATTTA | GTGAAT |
| 1016 | E6Sa1 | exon6 | SaCas9 | + | AGTAATCTTCTTACCTATGACT | ATGGAT |
| 1017 | E6Sa2 | exon6 | SaCas9 | + | GTGAAGTTGATTACATTAACCT | GTGGAT |
| 1018 | E6Sa3 | exon6 | SaCas9 | + | TTACATTAACCTGTGGATAATT | ACGAGT |
| 1019 | E6Sa4 | exon6 | SaCas9 | + | TTGATTGTCGGACCCAGCTCAG | GAGAAT |
| 1020 | E6Sa5 | exon6 | SaCas9 | − | CAGCTGGTCTGATGGCCTGGCT | TTGAAT |
| 1021 | E6Sa6 | exon6 | SaCas9 | − | ACAGTGAAAAGATTCTCCTGAG | CTGGGT |
| 1022 | E6Sa7 | exon6 | SaCas9 | − | AATGTAATGAAAAATATCATGG | CTGGAT |
| 1023 | E7Sa1 | exon7 | SaCas9 | + | AGTCCAGAAATTTACCAACCTT | CAGGAT |
| 1024 | E7Sa2 | exon7 | SaCas9 | + | AGAAATTTACCAACCTTCAGGA | TCGAGT |
| 1025 | E7Sa3 | exon7 | SaCas9 | + | GCCTAATTGATATCTGGCGATG | TTGAAT |
| 1026 | E7Sa4 | exon7 | SaCas9 | − | TTTTAGGCCAGACCTATTTGAC | TGGAAT |
| 1027 | E8Sa1 | exon8 | SaCas9 | + | TCCTTTACACACTTTACCTGTT | GAGAAT |
| 1028 | E8Sa2 | exon8 | SaCas9 | + | GCCTTGGCAACATTTCCACTTC | CTGGAT |
| 1029 | E8Sa3 | exon8 | SaCas9 | + | CACTTGTTGAGGCAAAACTTGG | AAGAGT |
| 1030 | E8Sa4 | exon8 | SaCas9 | + | TACATTAAGATGGACTTCTTAT | CTGGAT |
| 1031 | E9Sa1 | exon9 | SaCas9 | + | TGTGAAGGAAATGGGCTCCGTG | TAGGGT |
| 1032 | E9Sa2 | exon9 | SaCas9 | + | AGCCTGTGTGTAGGCATAGCTC | TTGAAT |
| 1033 | E9Sa6 | exon9 | SaCas9 | − | CAGATCACGGTCAGTCTAGCAC | AGGGAT |
| 1034 | E10Sa1 | exon10 | SaCas9 | + | AATTAACGTTTTAGTTTACCTC | ATGAGT |
| 1035 | E10Sa3 | exon10 | SaCas9 | − | GTCATTTGGCAGTTCATTGATG | GAGAGT |
| 1036 | E11Sa1 | exon11 | SaCas9 | + | GCTACCCTGAGGCATTCCCATC | TTGAAT |
| 1037 | E11Sa2 | exon11 | SaCas9 | + | CAATCAGCTTACTTCCCAATTG | TAGAAT |
| 1038 | E11Sa3 | exon11 | SaCas9 | − | TAAATTCAAGATGGGAATGCCT | CAGGGT |
| 1039 | E11Sa4 | exon11 | SaCas9 | − | ATGAATCTCCTAAATTCAAGAT | GGGAAT |
| 1040 | E11Sa5 | exon11 | SaCas9 | − | AGAAACTGAAGTACAAGAGCAG | ATGAAT |
| 1041 | E11Sa6 | exon11 | SaCas9 | − | TGGATTTGACAGCCCATCAGGG | CCGGGT |
| 1042 | E11Sa7 | exon11 | SaCas9 | − | CCTTCTTTGTCAGGGGTACATG | ATGGAT |
| 1043 | E12Sa1 | exon12 | SaCas9 | − | CCAGAATCAGAAACTGAAAGAG | TTGAAT |
| 1044 | E12Sa2 | exon12 | SaCas9 | − | GATCTCCAGAATCAGAAACTGA | AAGAGT |
| 1045 | E12Sa3 | exon12 | SaCas9 | − | ACATAGAGTTTTAATGGATCTC | CAGAAT |
| 1046 | E12Sa4 | exon12 | SaCas9 | − | TTTCAGTTTACATAGAGTTTTA | ATGGAT |
| 1047 | E12Sa5 | exon12 | SaCas9 | − | TCTTTCAAATTTTCAGTTTACA | TAGAGT |
| 1048 | E13Sa1 | exon13 | SaCas9 | + | ATTCATCAACTACCACCACCAT | GTGAGT |
| 1049 | E13Sa2 | exon13 | SaCas9 | + | ACTACCACCACCATGTGAGTGA | GAGAAT |
| 1050 | E13Sa3 | exon13 | SaCas9 | − | ACTCACATGGTGGTGGTAGTTG | ATGAAT |
| 1051 | E13Sa4 | exon13 | SaCas9 | − | AAGATCTAGAACAAGAACAAGT | CAGGGT |
| 1052 | E14Sa1 | exon14 | SaCas9 | + | CAGTAAGACGTTGCCATTTGAG | AAGGAT |
| 1053 | E14Sa2 | exon14 | SaCas9 | − | TCTGTAGATGGACAGAAGACCG | CTGGGT |
| 1054 | E15Sa1 | exon15 | SaCas9 | + | TTTGATCTTTAAAGCCAGTTGT | GTGAAT |
| 1055 | E16Sa1 | exon16 | SaCas9 | + | TATCCAGCCATGCTTCCGTCTT | CTGGGT |
| 1056 | E16Sa2 | exon16 | SaCas9 | + | CAGTGTTGAAAGAAGATCTTGT | TTGAGT |
| 1057 | E16Sa3 | exon16 | SaCas9 | + | GTTGAAAGAAGATCTTGTTTGA | GTGAAT |
| 1058 | E16Sa4 | exon16 | SaCas9 | + | TTTGAGTGAATACAGTTTGCCC | ATGGAT |
| 1059 | E16Sa6 | exon16 | SaCas9 | − | TAATTTAGTCCAAAAACTTGAA | AAGAGT |
| 1060 | E16Sa7 | exon16 | SaCas9 | − | GCTGGATAACTTTGCCCGGTGT | TGGGAT |
| 1061 | E16Sa8 | exon16 | SaCas9 | − | GACCCAGAAGACGGAAGCATGG | CTGGAT |
| 1062 | E16Sa9 | exon16 | SaCas9 | − | ACAAGATCTTCTTTCAACACTG | AAGAAT |
| 1063 | E16Sa10 | exon16 | SaCas9 | − | CTTGTTTTAACAGGTTTTAAAA | GCGGAT |
| 1064 | E17Sa1 | exon17 | SaCas9 | + | TGCTCTCACCTTTTCCTAATTT | CAGAAT |
| 1065 | E17Sa2 | exon17 | SaCas9 | + | GTTCCTCTTGAGCATGCTTTAC | CAGGAT |
| 1066 | E17Sa3 | exon17 | SaCas9 | + | CAGTTGTCTGTGTTAGTGATGG | CTGAGT |
| 1067 | E17Sa4 | exon17 | SaCas9 | − | CCAAAAGAAGAGGCAGATTACT | GTGGAT |
| 1068 | E18Sa1 | exon18 | SaCas9 | + | GACTCTGCAACACAGCTTCTGA | GCGAGT |
| 1069 | E18Sa2 | exon18 | SaCas9 | − | TCAGAAGCTGTGTTGCAGAGTC | CTGAAT |
| 1070 | E18Sa3 | exon18 | SaCas9 | − | TACTCGCTCAGAAGCTGTGTTG | CAGAGT |
| 1071 | E18Sa4 | exon18 | SaCas9 | − | TTGATATAACTGAACTTCACAG | CTGGAT |
| 1072 | E19Sa3 | exon19 | SaCas9 | − | TCAGGCCCTGGTGGAACAGATG | GTGAAT |
| 1073 | E20Sa1 | exon20 | SaCas9 | + | TTTTAATTGCTGTTGGCTCTGA | TGGGGT |
| 1074 | E20Sa2 | exon20 | SaCas9 | + | TGCTGTTGGCTCTGATGGGGTG | GTGGGT |
| 1075 | E20Sa3 | exon20 | SaCas9 | + | TTGGCTCTGATGGGGTGGTGGG | TTGGAT |
| 1076 | E20Sa4 | exon20 | SaCas9 | + | AAGTCTCTCACTTAGCAACTGG | CAGAAT |
| 1077 | E20Sa5 | exon20 | SaCas9 | − | GTCAGTTAAAAATTTGTAAGGT | AAGAAT |
| 1078 | E20Sa6 | exon20 | SaCas9 | − | CTAAGTGAGAGACTTAACTGGC | TGGAGT |
| 1079 | E20Sa7 | exon20 | SaCas9 | − | GAACAACTGAACAGCCGGTGGA | TCGAAT |
| 1080 | E20Sa8 | exon20 | SaCas9 | − | CCTCAGAACAACTGAACAGCCG | GTGGAT |
| 1081 | E21Sa1 | exon21 | SaCas9 | + | CACAAAGTCTGCATCCAGGAAC | ATGGGT |
| 1082 | E21Sa2 | exon21 | SaCas9 | + | CTTTCTCTTTCAGGGCTATGCT | TTGAAT |
| 1083 | E21Sa4 | exon21 | SaCas9 | − | GAAAGGACAAGGACCCATGTTC | CTGGAT |
| 1084 | E22Sa1 | exon22 | SaCas9 | + | ATATTCACAGACCTGCAATTCC | CCGAGT |
| 1085 | E22Sa2 | exon22 | SaCas9 | + | GGTGACACTAAGTTGAGGTATG | GAGAGT |
| 1086 | E22Sa7 | exon22 | SaCas9 | − | GAAATCATGGAGCAGAGACTCG | GGGAAT |
| 1087 | E22Sa8 | exon22 | SaCas9 | − | AGACCATGAGTGCCATCAGGAC | ATGGGT |
| 1088 | E22Sa9 | exon22 | SaCas9 | − | ACCAATGCGCTATCAGGAGACC | ATGAGT |
| 1089 | E23Sa3 | exon23 | SaCas9 | + | ATCTTGAATTACCTGAATTTTT | CGGAGT |
| 1090 | E23Sa4 | exon23 | SaCas9 | − | TTGTCAAAAGCTAGAGGAGCAA | ATGAAT |
| 1091 | E23Sa5 | exon23 | SaCas9 | − | GAAATTAGCCGGAAATATCAAT | CAGAAT |
| 1092 | E24Sa1 | exon24 | SaCas9 | + | TGCACTGTTTCAGCTGCTTTTT | TAGAAT |
| 1093 | E24Sa2 | exon24 | SaCas9 | + | TTCAGCTGCTTTTTTAGAATTT | CTGAAT |
| 1094 | E24Sa3 | exon24 | SaCas9 | + | CAACTTCAGCCATCCATTTCTT | CAGGGT |
| 1095 | E24Sa4 | exon24 | SaCas9 | − | TAAAAAAGCAGCTGAAACAGTG | CAGAGT |
| 1096 | E24Sa5 | exon24 | SaCas9 | − | GAAGGAGGAATGGCCTGCCCTT | GGGGAT |
| 1097 | E24Sa6 | exon24 | SaCas9 | − | GAAGTTGATGTTTTTCTGAAGG | AGGAAT |
| 1098 | E24Sa7 | exon24 | SaCas9 | − | ATCACATACAAACCCTGAAGAA | ATGGAT |
| 1099 | E25Sa1 | exon25 | SaCas9 | + | CCTGTTGGCACATGTGATCCCA | CTGAGT |
| 1100 | E25Sa2 | exon25 | SaCas9 | + | ATCCCACTGAGTGTTAAGTTCT | TTGAGT |
| 1101 | E25Sa3 | exon25 | SaCas9 | + | CATTGACACTGTTTAGACTGGG | CTGAAT |
| 1102 | E25Sa4 | exon25 | SaCas9 | + | TGTTTAGACTGGGCTGAATTGT | CTGAAT |
| 1103 | E25Sa5 | exon25 | SaCas9 | − | ACTCAAAGAACTTAACACTCAG | TGGGAT |
| 1104 | E25Sa6 | exon25 | SaCas9 | − | AAGATAAAGAATGAAGCAGAGC | CAGAGT |
| 1105 | E25Sa7 | exon25 | SaCas9 | − | CAATGAAGGTGGGCAGAAGATA | AAGAAT |
| 1106 | E26Sa1 | exon26 | SaCas9 | + | CAACTGCTTTCTGTAATTCATC | TGGAGT |
| 1107 | E26Sa2 | exon26 | SaCas9 | − | GATTTTGAATATAAAACTCCAG | ATGAAT |
| 1108 | E26Sa3 | exon26 | SaCas9 | − | GAAGAGTATCTTGAGAGAGATT | TTGAAT |
| 1109 | E26Sa4 | exon26 | SaCas9 | − | GAATGGATGACACAAGCTGAAG | AAGAGT |
| 1110 | E26Sa5 | exon26 | SaCas9 | − | AAGATCTATCAGAGATGCACGA | ATGGAT |
| 1111 | E26Sa6 | exon26 | SaCas9 | − | CAGAAAGATCTATCAGAGATGC | ACGAAT |
| 1112 | E27Sa1 | exon27 | SaCas9 | + | AGAGCCACTGGTAGTTGGTGGT | TAGAGT |
| 1113 | E27Sa2 | exon27 | SaCas9 | + | GACACTATTTACAGACTCAGTA | AGGAGT |
| 1114 | E27Sa4 | exon27 | SaCas9 | − | CTACCAGTGGCTCTGCACTAGG | CTGAAT |
| 1115 | E27Sa5 | exon27 | SaCas9 | − | GAAGCGAAAGTGAAACTCCTTA | CTGAGT |
| 1116 | E28Sa1 | exon28 | SaCas9 | + | CAGAGATTTCCTCAGCTCCGCC | AGGAAT |
| 1117 | E28Sa2 | exon28 | SaCas9 | − | GCAAACAAGTGGCTAAATGAAG | TAGAAT |
| 1118 | E28Sa3 | exon28 | SaCas9 | − | TAGGAAGTTTGGGCATGTTGGC | ATGAGT |
| 1119 | E29Sa1 | exon29 | SaCas9 | + | TCTTCATGTAGTTCCCTCCAAC | GAGAAT |
| 1120 | E29Sa2 | exon29 | SaCas9 | + | CATCCATGACTCCGCCATCTGT | TAGGGT |
| 1121 | E29Sa3 | exon29 | SaCas9 | + | CTGTTAGGGTCTGTGCCAATAT | GCGAAT |
| 1122 | E29Sa4 | exon29 | SaCas9 | + | TGTGCCAATATGCGAATCTGAT | TTGGGT |
| 1123 | E29Sa5 | exon29 | SaCas9 | + | CGAATCTGATTTGGGTTATCCT | CTGAAT |
| 1124 | E29Sa6 | exon29 | SaCas9 | − | GACCCTAACAGATGGCGGAGTC | ATGGAT |
| 1125 | E29Sa7 | exon29 | SaCas9 | − | TGGCACAGACCCTAACAGATGG | CGGAGT |
| 1126 | E29Sa8 | exon29 | SaCas9 | − | TGAAAATTTGATGCGACATTCA | GAGGAT |
| 1127 | E30Sa1 | exon30 | SaCas9 | + | ATAAGCTGCCAACTGCTTGTCA | ATGAAT |
| 1128 | E30Sa2 | exon30 | SaCas9 | + | TGTCAATGAATGTGAGGGACTC | CTGGAT |
| 1129 | E30Sa3 | exon30 | SaCas9 | + | GAGGGACTCCTGGATTAAGTGT | AAGGAT |
| 1130 | E30Sa4 | exon30 | SaCas9 | + | ATTTTTCAGTCTCCTGGGCAGA | CTGGAT |
| 1131 | E30Sa8 | exon30 | SaCas9 | − | GAAAAATCCTTACACTTAATCC | AGGAGT |
| 1132 | E31Sa1 | exon31 | SaCas9 | + | TCTCATGACTTGTCAAATCAGA | TTGGAT |
| 1133 | E31Sa3 | exon31 | SaCas9 | − | ATCAGGGGAAGGAGGCTGCCCA | AAGAGT |
| 1134 | E32Sa1 | exon32 | SaCas9 | + | CTGCTCAAAATTGGCTGGTTTC | TGGAAT |
| 1135 | E32Sa2 | exon32 | SaCas9 | − | GCACTTGCCTGCATTGGAAACA | AAGAGT |
| 1136 | E33Sa1 | exon33 | SaCas9 | + | GTTACTCTTTCATCAAGTTCTT | TGGGAT |
| 1137 | E33Sa2 | exon33 | SaCas9 | − | AAAATCCCAAAGAACTTGATGA | AAGAGT |
| 1138 | E33Sa3 | exon33 | SaCas9 | − | AACTTAGAACTTGTATAAAAGT | CTGAGT |
| 1139 | E34Sa1 | exon34 | SaCas9 | + | TTTACCTTTCCCCAGGCAACTT | CAGAAT |
| 1140 | E34Sa3 | exon34 | SaCas9 | − | AGTTGAAGGAATGCCTAGTAAT | TTGGAT |
| 1141 | E34Sa4 | exon34 | SaCas9 | − | TGACAAAGAGATCAGCAGTTGA | AGGAAT |
| 1142 | E34Sa5 | exon34 | SaCas9 | − | GAATGGCTGGCAGCTACAGATA | TGGAAT |
| 1143 | E34Sa6 | exon34 | SaCas9 | − | CGAAAGGAAATGAATGTCTTGA | CAGAAT |
| 1144 | E34Sa7 | exon34 | SaCas9 | − | GTCCCGTAAGATGCGAAAGGAA | ATGAAT |
| 1145 | E35Sa1 | exon35 | SaCas9 | + | TATCCAGTTACTATTCAGAAGA | CTGAGT |
| 1146 | E35Sa2 | exon35 | SaCas9 | + | CCTTCTGTTTCTCAATCTCTTT | TTGAGT |
| 1147 | E35Sa3 | exon35 | SaCas9 | − | ATAGCTGTCACCTCCCGAGCAG | AAGAGT |
| 1148 | E35Sa4 | exon35 | SaCas9 | − | AACTCAGTCTTCTGAATAGTAA | CTGGAT |
| 1149 | E35Sa5 | exon35 | SaCas9 | − | GGTGGAAGATAAACTCAGTCTT | CTGAAT |
| 1150 | E35Sa6 | exon35 | SaCas9 | − | TGAGAAACAGAAGGTGCACCTG | AAGAGT |
| 1151 | E36Sa1 | exon36 | SaCas9 | + | CTTAAGCACGTCTTCTTTTTGC | TGGGGT |
| 1152 | E36Sa2 | exon36 | SaCas9 | + | ATTCATCCAAAAGTGTGTCAGC | CTGAAT |
| 1153 | E36Sa3 | exon36 | SaCas9 | − | ATTCAGGCTGACACACTTTTGG | ATGAAT |
| 1154 | E36Sa4 | exon36 | SaCas9 | − | GATCATTCAGGCTGACACACTT | TTGGAT |
| 1155 | E36Sa5 | exon36 | SaCas9 | − | AGAATGTGGACCACATCACAAA | GTGGAT |
| 1156 | E36Sa6 | exon36 | SaCas9 | − | GAAACACATGGAAACTTTTGAC | CAGAAT |
| 1157 | E37Sa1 | exon37 | SaCas9 | + | AAGTTTGCTGCTTGGTCACGTG | TAGAGT |
| 1158 | E37Sa2 | exon37 | SaCas9 | − | ATCGATTTGCAGCCATTTCACA | CAGAAT |
| 1159 | E37Sa3 | exon37 | SaCas9 | − | AATATAGCGTTTAAAGGCAGAA | CTGAAT |
| 1160 | E38Sa1 | exon38 | SaCas9 | + | CCTCTTTCAGATTCACCCCCTG | CTGAAT |
| 1161 | E38Sa2 | exon38 | SaCas9 | + | GGTTCAAGCAATTTTTGTATAT | CTGAGT |
| 1162 | E38Sa3 | exon38 | SaCas9 | + | TAAACTGCTCCAATTCCTTCAA | AGGAAT |
| 1163 | E38Sa5 | exon38 | SaCas9 | − | GGAGGCTGAAATTCAGCAGGGG | GTGAAT |
| 1164 | E38Sa6 | exon38 | SaCas9 | − | CACTGGAGGCTGAAATTCAGCA | GGGGGT |
| 1165 | E38Sa7 | exon38 | SaCas9 | − | TTTTAGGCCTCCATTCCTTTGA | AGGAAT |
| 1166 | E39Sa1 | exon39 | SaCas9 | − | AAAGAGGAGACAACTTACAACA | AAGAAT |
| 1167 | E39Sa2 | exon39 | SaCas9 | − | GAAGACAATGAGGGTACTGTAA | AAGAAT |
| 1168 | E39Sa3 | exon39 | SaCas9 | − | TTTTGATCAGAATGAAGACAAT | GAGGGT |
| 1169 | E40Sa2 | exon40 | SaCas9 | − | GGCTGATGATCTCCTGAAATGC | TTGGAT |
| 1170 | E41Sa1 | exon41 | SaCas9 | + | ACAACTCACAATTTGTGCAAAG | TTGAGT |
| 1171 | E41Sa2 | exon41 | SaCas9 | + | TTTCCCGCCAGCGCTTGCTGAG | CTGGAT |
| 1172 | E41Sa3 | exon41 | SaCas9 | + | GCCAGCGCTTGCTGAGCTGGAT | CTGAGT |
| 1173 | E41Sa4 | exon41 | SaCas9 | − | AAGACTCAACTTTGCACAAATT | GTGAGT |
| 1174 | E41Sa5 | exon41 | SaCas9 | − | TAGGCAAGCTGAGGGCTTGTCT | GAGGAT |
| 1175 | E41Sa6 | exon41 | SaCas9 | − | ATTGCAGAAGAAGAAAGAGGAG | CTGAAT |
| 1176 | E41Sa7 | exon41 | SaCas9 | − | TTTGCTCAATAGGAAATTGATC | GGGAAT |
| 1177 | E42Sa1 | exon42 | SaCas9 | + | CTTCTAATAGGGCTTGTGAGAC | ATGAGT |
| 1178 | E42Sa2 | exon42 | SaCas9 | − | TTTGAAGATCTCTTTAAGCAAG | AGGAGT |
| 1179 | E43Sa1 | exon43 | SaCas9 | + | GCAATGCTGCTGTCTTCTTGCT | ATGAAT |
| 1180 | E43Sa2 | exon43 | SaCas9 | − | AACAAAATGTACAAGGACCGAC | AAGGGT |
| 1181 | E43Sa3 | exon43 | SaCas9 | − | TGCAAAGTGCAACGCCTGTGGA | AAGGGT |
| 1182 | E43Sa4 | exon43 | SaCas9 | − | ATAGTCTACAACAAAGCTCAGG | TCGGAT |
| 1183 | E46Sa1 | exon46 | SaCas9 | + | GCTGCTCTTTTCCAGGTTCAAG | TGGGAT |
| 1184 | E46Sa3 | exon46 | SaCas9 | − | TCAGAATTTCAAAGAGATTTAA | ATGAAT |
| 1185 | E46Sa4 | exon46 | SaCas9 | − | GAAGAACAAAAGAATATCTTGT | CAGAAT |
| 1186 | E46Sa5 | exon46 | SaCas9 | − | TTTCTCCAGGCTAGAAGAACAA | AAGAAT |
| 1187 | E47Sa1 | exon47 | SaCas9 | + | GCTTATGGGAGCACTTACAAGC | ACGGGT |
| 1188 | E47Sa2 | exon47 | SaCas9 | + | CTCCAGTTTCATTTAATTGTTT | GAGAAT |
| 1189 | E47Sa3 | exon47 | SaCas9 | − | AGCTCAAGCAGACAAATCTCCA | GTGGAT |
| 1190 | E47Sa4 | exon47 | SaCas9 | − | TGGAAGAGTTGCCCCTGCGCCA | GGGAAT |
| 1191 | E47Sa5 | exon47 | SaCas9 | − | TGTCTGTTTCAGTTACTGGTGG | AAGAGT |
| 1192 | E48Sa1 | exon48 | SaCas9 | − | GCTGCTGTGGTTATCTCCTATT | AGGAAT |
| 1193 | E49Sa1 | exon49 | SaCas9 | + | GTTGCTTCATTACCTTCACTGG | CTGAGT |
| 1194 | E49Sa2 | exon49 | SaCas9 | − | AATAGCAGTTCAAGCTAAACAA | CCGGAT |
| 1195 | E52Sa1 | exon52 | SaCas9 | + | TTTCAAATTTTGGGCAGCGGTA | ATGAGT |
| 1196 | E52Sa3 | exon52 | SaCas9 | − | TCAAGAGGCTAGAACAATCATT | ACGGAT |
| 1197 | E52Sa4 | exon52 | SaCas9 | − | TTTGTTCTTACAGGCAACAATG | CAGGAT |
| 1198 | E54Sa1 | exon54 | SaCas9 | + | AATAATGTAATTCATACCTTTT | ATGAAT |
| 1199 | E54Sa2 | exon54 | SaCas9 | + | TGGACTTTTCTGGTATCATCTG | CAGAAT |
| 1200 | E54Sa5 | exon54 | SaCas9 | − | TGGAGAAGCATTCATAAAAGGT | ATGAAT |
| 1201 | E54Sa6 | exon54 | SaCas9 | − | CAGAAAAGTCCACATGATAACA | GAGAAT |
| 1202 | E54Sa7 | exon54 | SaCas9 | − | TGACTTGGCCCTGAAACTTCTC | CGGGAT |
| 1203 | E55Sa1 | exon55 | SaCas9 | + | TTCATCAGCTCTTTTACTCCCT | TGGAGT |
| 1204 | E55Sa2 | exon55 | SaCas9 | + | AGTCTTCTAGGAGCCTTTCCTT | ACGGGT |
| 1205 | E55Sa3 | exon55 | SaCas9 | + | GGGGGAACTGTTGCAGTAATCT | ATGAGT |
| 1206 | E55Sa4 | exon55 | SaCas9 | − | AAAGGCTCCTAGAAGACTCCAA | GGGAGT |
| 1207 | E55Sa5 | exon55 | SaCas9 | − | TGAAACAACTGCCAATGTCCTA | CAGGAT |
| 1208 | E56Sa1 | exon56 | SaCas9 | + | GACTGCATCATCGGAACCTTCC | AGGGAT |
| 1209 | E56Sa2 | exon56 | SaCas9 | + | CATCGGAACCTTCCAGGGATCT | CAGGAT |
| 1210 | E56Sa4 | exon56 | SaCas9 | − | TTTGGATAACATGAACTTCAAG | TGGAGT |
| 1211 | E56Sa5 | exon56 | SaCas9 | − | TGCAGTCCTGTTACAAAGACGT | TTGGAT |
| 1212 | E56Sa6 | exon56 | SaCas9 | − | TCACACAGATGTTTATCACAAC | CTGGAT |
| 1213 | E57Sa1 | exon57 | SaCas9 | − | TTCAGAAGCAGAACGATGTACA | TAGGGT |
| 1214 | E57Sa2 | exon57 | SaCas9 | − | GTGTGGCTACAGCTGAAAGATG | ATGAAT |
| 1215 | E58Sa1 | exon58 | SaCas9 | + | TCAATTACCTCTGGGCTCCTGG | TAGAGT |
| 1216 | E58Sa2 | exon58 | SaCas9 | + | TCAGAAATATTCGTACAGTCTC | AAGAGT |
| 1217 | E58Sa4 | exon58 | SaCas9 | − | TCATGAGTACTCTTGAGACTGT | ACGAAT |
| 1218 | E58Sa5 | exon58 | SaCas9 | − | GAAAACTAAAGAACCTGTAATC | ATGAGT |
| 1219 | E58Sa6 | exon58 | SaCas9 | − | CTCATTTCACAGGCCTTCAAGA | GGGAAT |
| 1220 | E59Sa1 | exon59 | SaCas9 | + | ACTTTCTCGAGGTGATCTTGGA | GAGAGT |
| 1221 | E59Sa2 | exon59 | SaCas9 | + | GAGGAGATCGCCCACGGGCTGC | CAGGAT |
| 1222 | E59Sa3 | exon59 | SaCas9 | + | ATCCGTGGCCTCTTGAAGTTCC | CGGAGT |
| 1223 | E59Sa4 | exon59 | SaCas9 | + | CTTGAAGTTCCCGGAGTCTTTC | AAGGGT |
| 1224 | E59Sa5 | exon59 | SaCas9 | + | TCTATTTTTCTCTGCCAGTCAG | CGGAGT |
| 1225 | E59Sa6 | exon59 | SaCas9 | + | CCTCAGCCTGCTTTCGTAGAAG | CCGAGT |
| 1226 | E59Sa7 | exon59 | SaCas9 | − | CTGCGCCAAGCTGAGGTGATCA | AGGGAT |
| 1227 | E59Sa8 | exon59 | SaCas9 | − | ACTCCGGGAACTTCAAGAGGCC | ACGGAT |
| 1228 | E59Sa9 | exon59 | SaCas9 | − | AAGCAGGCTGAGGAGGTCAATA | CTGAGT |
| 1229 | E59Sa10 | exon59 | SaCas9 | − | GCTGCCTCCTGAGGAGAGAGCC | CAGAAT |
| 1230 | E60Sa1 | exon60 | SaCas9 | + | TCCATCTGGTGTTCAGGTCTTC | CAGAGT |
| 1231 | E60Sa2 | exon60 | SaCas9 | + | TGCTGAGGTTATACGGTGAGAG | CTGAAT |
| 1232 | E61Sa1 | exon61 | SaCas9 | − | CCTCCCAGGTGGCCGTCGAGGA | CCGAGT |
| 1233 | E62Sa1 | exon62 | SaCas9 | − | TCCCTTCTTTTCAGCGTCTGTC | CAGGGT |
| 1234 | E63Sa1 | exon63 | SaCas9 | + | GACTGGTAGAGCTCTGTCATTT | TGGGAT |
| 1235 | E63Sa2 | exon63 | SaCas9 | + | TGGGATGGTCCCAGCAAGTTGT | TTGAGT |
| 1236 | E64Sa1 | exon64 | SaCas9 | + | GCAAAGGGCCTTCTGCAGTCTT | CGGAGT |
| 1237 | E64Sa2 | exon64 | SaCas9 | + | TTTCATGGCAGTCCTATAAGCT | GAGAAT |
| 1238 | E64Sa3 | exon64 | SaCas9 | − | GTTTTCCCTCTTTTCAGCTGAC | CTGAAT |
| 1239 | E65Sa1 | exon65 | SaCas9 | + | TGGTCAAACAATTAATAATCTG | CAGGAT |
| 1240 | E65Sa2 | exon65 | SaCas9 | − | GGATATGTGTCTGAACTGGCTG | CTGAAT |
| 1241 | E65Sa3 | exon65 | SaCas9 | − | TTTGGTCAACGTCCCTCTCTGC | GTGGAT |
| 1242 | E65Sa4 | exon65 | SaCas9 | − | CCTCAAGCAAAATGACCAGCCC | ATGGAT |
| 1243 | E66Sa1 | exon66 | SaCas9 | + | TGCCAGTTTTAAAAGACAGGAC | ACGGAT |
| 1244 | E66Sa3 | exon66 | SaCas9 | − | TTCATAATAGGGGACGAACAGG | GAGGAT |
| 1245 | E67Sa1 | exon67 | SaCas9 | + | TGGCTCAATGTTACTGCCCCCA | AAGGAT |
| 1246 | E67Sa2 | exon67 | SaCas9 | + | ATGCAACTTCACCCAACTGTCT | TGGAAT |
| 1247 | E67Sa3 | exon67 | SaCas9 | + | CTTCACCCAACTGTCTTGGAAT | TTGGAT |
| 1248 | E67Sa4 | exon67 | SaCas9 | + | CCCAACTGTCTTGGAATTTGGA | TAGAAT |
| 1249 | E67Sa5 | exon67 | SaCas9 | − | TTCTATCCAAATTCCAAGACAG | TTGGGT |
| 1250 | E67Sa6 | exon67 | SaCas9 | − | TTCAAGCAAGTGGCAAGTTCAA | CAGGAT |
| 1251 | E68Sa2 | exon68 | SaCas9 | + | GACGGGCAGCCACACCATGGAC | TGGGGT |
| 1252 | E68Sa3 | exon68 | SaCas9 | − | ATCTGCAAAGAGTGTCCAATCA | TTGGAT |
| 1253 | E68Sa4 | exon68 | SaCas9 | − | CAGGCCAAATGTAACATCTGCA | AAGAGT |
| 1254 | E68Sa5 | exon68 | SaCas9 | − | TGGTGTGGCTGCCCGTCCTGCA | CAGAGT |
| 1255 | E68Sa6 | exon68 | SaCas9 | − | TCGAAGCGGCCCTCTTCCTAGA | CTGGAT |
| 1256 | E69Sa2 | exon69 | SaCas9 | + | ACCGGAGTGCAATATTCCACCA | TGGGAT |
| 1257 | E69Sa4 | exon69 | SaCas9 | − | CATAAAATGCACTATCCCATGG | TGGAAT |
| 1258 | E69Sa5 | exon69 | SaCas9 | − | GCCAAAGCTGCTTTTTTTCTGG | TCGAGT |
| 1259 | E69Sa6 | exon69 | SaCas9 | − | GTTTTTGCTCTTTATCAGGTAC | AGGAGT |
| 1260 | E70Sa1 | exon70 | SaCas9 | + | TGCACTGGCAGGTAGCCCATTC | GGGGAT |
| 1261 | E70Sa2 | exon70 | SaCas9 | − | TAGAGGGGGACAACATGGAAAC | GTGAGT |
| 1262 | E70Sa3 | exon70 | SaCas9 | − | AAAGGTATTTTGCGAAGCATCC | CCGAAT |
| 1263 | E71Sa2 | exon71 | SaCas9 | + | AATCTACTGGCCAGAAGTTGAT | CAGAGT |
| 1264 | E71Sa4 | exon71 | SaCas9 | − | ACTTCTGGCCAGTAGATTCTGC | GTGAGT |
| 1265 | E72Sa1 | exon72 | SaCas9 | + | CTGCTAGCATAATGTTCAATGC | GTGAAT |
| 1266 | E72Sa2 | exon72 | SaCas9 | + | TAGCATAATGTTCAATGCGTGA | ATGAGT |
| 1267 | E73Sa1 | exon73 | SaCas9 | − | CTAGCAGAAATGGAAAACAGCA | ATGGAT |
| 1268 | E74Sa1 | exon74 | SaCas9 | + | TGTTTTCTTCCTCAAGATCTGC | TAGGAT |
| 1269 | E74Sa2 | exon74 | SaCas9 | + | GGACTACGAGGCTGGCTCAGGG | GGGAGT |
| 1270 | E74Sa3 | exon74 | SaCas9 | + | GGTTCAAACTTTGGCAGTAATG | CTGGAT |
| 1271 | E74Sa4 | exon74 | SaCas9 | − | CAGATCTTGAGGAAGAAAACAG | GTGAGT |
| 1272 | E74Sa5 | exon74 | SaCas9 | − | GTGAGGAAAGAGGGGAGCTAGA | GAGAAT |
| 1273 | E74Sa6 | exon74 | SaCas9 | − | TGCCCAGATCTTGATTTCCTTA | GAGAGT |
| 1274 | E75Sa1 | exon75 | SaCas9 | + | CCAGCTGTTTATTGTGGTCTTC | CAGGAT |
| 1275 | E75Sa3 | exon75 | SaCas9 | − | CTGGAAGACCACAATAAACAGC | TGGAGT |
| 1276 | E75Sa4 | exon75 | SaCas9 | − | AACACAAAGGCCGCCTGGAAGC | CAGGAT |
| 1277 | E75Sa5 | exon75 | SaCas9 | − | GCCCACCTCTCCCCAGAGTCCC | CGGGAT |
| 1278 | E75Sa6 | exon75 | SaCas9 | − | TGAAATGATGCCCACCTCTCCC | CAGAGT |
| 1279 | E75Sa7 | exon75 | SaCas9 | − | GATGCCAATAGGAATCTGCAAG | CAGAAT |
| 1280 | E76Sa1 | exon76 | SaCas9 | + | GAGTAGCTAGGACACTTACCCA | TGGAGT |
| 1281 | E76Sa3 | exon76 | SaCas9 | − | TGGCAGTCAAACTTCGGACTCC | ATGGGT |
| 1282 | E76Sa4 | exon76 | SaCas9 | − | ACAGCAGTCAGCCTATGCTGCT | CCGAGT |
| 1283 | E76Sa5 | exon76 | SaCas9 | − | TTAGCCCCAGGCAGAGGCCAAA | GTGAAT |
| 1284 | E77Sa1 | exon77 | SaCas9 | + | AGCTTACCTCTTGAACTAGGGA | AGGAGT |
| 1285 | E77Sa2 | exon77 | SaCas9 | + | TCTTGAACTAGGGAAGGAGTTG | TTGAGT |
| 1286 | E77Sa3 | exon77 | SaCas9 | − | AGTCCTCCCCAGGACACAAGCA | CAGGGT |
| 1287 | E78Sa1 | exon78 | SaCas9 | + | TAACCTCTCTCATTGGCTTTCC | AGGGGT |
| 1288 | E79Sa1 | exon79 | SaCas9 | + | GCACTCTATTTACCTCTGATTT | TAGAAT |
| 1289 | E79Sa2 | exon79 | SaCas9 | + | CTTACTTACTTAAACTTCTTAG | TAGGAT |
| 1290 | E79Sa3 | exon79 | SaCas9 | + | AAAGTAACCCCTTGTTTTAAAT | CTGAGT |
| 1291 | E79Sa4 | exon79 | SaCas9 | + | TAAATCTGAGTTTTAAAAATCC | TTGGGT |
| 1292 | E79Sa5 | exon79 | SaCas9 | + | GGTAATTTGTTACCTTAGAGCT | TTGGGT |
| 1293 | E79Sa6 | exon79 | SaCas9 | + | TGAAAATTATGAAGGAAAAAGA | AAGAAT |
| 1294 | E79Sa7 | exon79 | SaCas9 | + | ATAGGTCACACGGTGGTATCTA | TTGAAT |
| 1295 | E79Sa8 | exon79 | SaCas9 | + | GTCACACGGTGGTATCTATTGA | ATGAAT |
| 1296 | E79Sa9 | exon79 | SaCas9 | + | AAAAAGAAATAAAATGGCATGA | AAGAGT |
| 1297 | E79Sa10 | exon79 | SaCas9 | + | TTAACCTGTCTAATCCACCAAG | AAGGGT |
| 1298 | E79Sa11 | exon79 | SaCas9 | + | AAGAAGGGTTTTTTTGTAACAT | TTGAAT |
| 1299 | E79Sa12 | exon79 | SaCas9 | + | GAACTACTCGCAGAGAAATGCA | AAGGAT |
| 1300 | E79Sa13 | exon79 | SaCas9 | + | TGGAAACACAGTTCATGGGCTT | CTGGGT |
| 1301 | E79Sa14 | exon79 | SaCas9 | + | CAATCATCCAATCCTTCACTTA | AAGAGT |
| 1302 | E79Sa15 | exon79 | SaCas9 | + | AAAGAGTGGCCTACTCCTTCAC | AGGGAT |
| 1303 | E79Sa16 | exon79 | SaCas9 | + | TACTCCTTCACAGGGATGGGCT | GGGAAT |
| 1304 | E79Sa17 | exon79 | SaCas9 | + | TATCATCGTCCTGCTACTGCTT | GGGAGT |
| 1305 | E79Sa18 | exon79 | SaCas9 | + | TACCTTCTGATGTTCACAAGGT | CAGAAT |
| 1306 | E79Sa19 | exon79 | SaCas9 | + | TGGCATTGCTAGCAGCAGGAAG | CTGAAT |
| 1307 | E79Sa20 | exon79 | SaCas9 | + | ATTCTAGACCAAGCAGGTAAGC | CTGGAT |
| 1308 | E79Sa21 | exon79 | SaCas9 | + | ACTAGAAGTAATTTCTTTCTAT | TAGGAT |
| 1309 | E79Sa22 | exon79 | SaCas9 | + | ATATGCAAAAAAAGAAAAAGCC | ATGAAT |
| 1310 | E79Sa23 | exon79 | SaCas9 | + | AAGAAAAAGCCATGAATTTCAT | ATGGAT |
| 1311 | E79Sa24 | exon79 | SaCas9 | + | TTTCATATGGATATCACGCCAA | AAGGAT |
| 1312 | E79Sa25 | exon79 | SaCas9 | + | TGTGTGTGTTTGTTTTGTTTTT | AGGGGT |
| 1313 | E79Sa26 | exon79 | SaCas9 | + | ACTGTCTAATCCTCTTTGTTGT | ATGAAT |
| 1314 | E79Sa27 | exon79 | SaCas9 | + | ATGAATATTATAAAAACCATGC | GGGAAT |
| 1315 | E79Sa28 | exon79 | SaCas9 | + | TTATAAAAACCATGCGGGAATC | AGGAGT |
| 1316 | E79Sa29 | exon79 | SaCas9 | − | TAACACCAACACTGTAACATTT | ACGAAT |
| 1317 | E79Sa30 | exon79 | SaCas9 | − | TTTTCAGGTACTGAGTTCTTAC | TTGAGT |
| 1318 | E79Sa31 | exon79 | SaCas9 | − | GTTTTGTCATTGTTTTCAGGTA | CTGAGT |
| 1319 | E79Sa32 | exon79 | SaCas9 | − | TTTTAGACACATTAGCTCTGGA | GTGAGT |
| 1320 | E79Sa33 | exon79 | SaCas9 | − | TTTCTTTTAGACACATTAGCTC | TGGAGT |
| 1321 | E79Sa34 | exon79 | SaCas9 | − | TCATTCTAAAATCAGAGGTAAA | TAGAGT |
| 1322 | E79Sa35 | exon79 | SaCas9 | − | TTTAAAACTCAGATTTAAAACA | AGGGGT |
| 1323 | E79Sa36 | exon79 | SaCas9 | − | ACGCTGGACCTTTTCTTTACCC | AAGGAT |
| 1324 | E79Sa37 | exon79 | SaCas9 | − | TGTTCCTGATAATTGTGCACAC | CTGAGT |
| 1325 | E79Sa38 | exon79 | SaCas9 | − | TATTTCTACCTCACTTTGGTTT | TGGGGT |
| 1326 | E79Sa39 | exon79 | SaCas9 | − | AAGTGTAATTAGCTTTTGGAGA | GTGGGT |
| 1327 | E79Sa40 | exon79 | SaCas9 | − | CATCAAGTGTAATTAGCTTTTG | GAGAGT |
| 1328 | E79Sa41 | exon79 | SaCas9 | − | CATCAAGTGTAATTAGCTTTTG | GAGAGT |
| 1329 | E79Sa42 | exon79 | SaCas9 | − | TGTTACAAAAAAACCCTTCTTG | GTGGAT |
| 1330 | E79Sa43 | exon79 | SaCas9 | − | TTTCCATCCTTTGCATTTCTCT | GCGAGT |
| 1331 | E79Sa44 | exon79 | SaCas9 | − | TAGATTTATTGTCCCATGTGGG | ATGAGT |
| 1332 | E79Sa45 | exon79 | SaCas9 | − | TTTTTAGATTTATTGTCCCATG | TGGGAT |
| 1333 | E79Sa46 | exon79 | SaCas9 | − | CTCTTCTCACAGTCAAAAGGAA | CTGGGT |
| 1334 | E79Sa47 | exon79 | SaCas9 | − | AGGCCACTCTTTAAGTGAAGGA | TTGGAT |
| 1335 | E79Sa48 | exon79 | SaCas9 | − | GGAGTAGGCCACTCTTTAAGTG | AAGGAT |
| 1336 | E79Sa49 | exon79 | SaCas9 | − | GATTCCCAGCCCATCCCTGTGA | AGGAGT |
| 1337 | E79Sa50 | exon79 | SaCas9 | − | ACGATGATAGGGCTGGAGGGCT | ATGGAT |
| 1338 | E79Sa51 | exon79 | SaCas9 | − | ACACAGGACTTATTATATCAGA | GTGAGT |
| 1339 | E79Sa52 | exon79 | SaCas9 | − | GAATACACAGGACTTATTATAT | CAGAGT |
| 1340 | E79Sa53 | exon79 | SaCas9 | − | TTTTTTTAAAGGGAACATGTGA | ATGAAT |
| 1341 | E79Sa54 | exon79 | SaCas9 | − | TGGATTTTTTTAAAGGGAACAT | GTGAAT |
| 1342 | E79Sa55 | exon79 | SaCas9 | − | ACAACGAAAGTAAAGTAAAGTA | TTGGAT |
| 1343 | E79Sa56 | exon79 | SaCas9 | − | AGGCTTACCTGCTTGGTCTAGA | ATGGAT |
| 1344 | E79Sa57 | exon79 | SaCas9 | − | ATCCAGGCTTACCTGCTTGGTC | TAGAAT |
| 1345 | E79Sa58 | exon79 | SaCas9 | − | ATAGTTATATAGATAAAGAGAT | ACGAAT |
| 1346 | E79Sa59 | exon79 | SaCas9 | − | CTGTCAGCTGAGTGGGGCAGGC | TTGAGT |
| 1347 | E79Sa60 | exon79 | SaCas9 | − | CTGCTCATTTGAGAACTGTCAG | CTGAGT |
| 1348 | E79Sa61 | exon79 | SaCas9 | − | ATTTCTTTATATGGAACGCATT | TTGGGT |
| 1349 | E79Sa62 | exon79 | SaCas9 | − | GAAATAAATCTATATTTTTGTG | AAGGGT |
| 1350 | E79Sa63 | exon79 | SaCas9 | − | ACAACAAAGAGGATTAGACAGT | AAGAGT |
| 1351 | E79Sa64 | exon79 | SaCas9 | − | TTTATAATATTCATACAACAAA | GAGGAT |
| 1352 | E79Sa65 | exon79 | SaCas9 | − | GTCATGACAGATGAAGAAGGAG | CAGAAT |
| 1353 | E79Sa66 | exon79 | SaCas9 | − | GCAGATGATTTGGGCAGAGCGA | TGGAGT |
| 1354 | E1SaCas9KKH2 | exon1 | SaCas9KKH | + | TTCTTCCCACCAAAGCATTTTG | AAAAGT |
| 1355 | E1SaCas9KKH3 | exon1 | SaCas9KKH | + | TTTGAAAAGTGTATATCAAGGC | AGCGAT |
| 1356 | E1SaCas9KKH4 | exon1 | SaCas9KKH | + | ATCAAGGCAGCGATAAAAAAAA | CCTGGT |
| 1357 | E1SaCas9KKH5 | exon1 | SaCas9KKH | + | GCAGCGATAAAAAAAACCTGGT | AAAAGT |
| 1358 | E1SaCas9KKH6 | exon1 | SaCas9KKH | + | AAAGTTCTTCAAACTTTATTGC | TCCAGT |
| 1359 | E1SaCas9KKH7 | exon1 | SaCas9KKH | + | TTATTGCTCCAGTAGGCTTAAA | AACAAT |
| 1360 | E1SaCas9KKH8 | exon1 | SaCas9KKH | + | AACAAACTTCAGCAGCTTTAAA | AAAAGT |
| 1361 | E1SaCas9KKH9 | exon1 | SaCas9KKH | + | GCAGCTTTAAAAAAAGTAACAC | TTCAGT |
| 1362 | E1SaCas9KKH10 | exon1 | SaCas9KKH | + | TTTTTCCTATTCGTTTTTCTCC | GAAGGT |
| 1363 | E1SaCas9KKH11 | exon1 | SaCas9KKH | + | TTCCTATTCGTTTTTCTCCGAA | GGTAAT |
| 1364 | E1SaCas9KKH12 | exon1 | SaCas9KKH | + | TTTCTCCGAAGGTAATTGCCTC | CCAGAT |
| 1365 | E1SaCas9KKH13 | exon1 | SaCas9KKH | + | CGAAGGTAATTGCCTCCCAGAT | CTGAGT |
| 1366 | E1SaCas9KKH14 | exon1 | SaCas9KKH | + | CCAGATCTGAGTCCTGTAGGGG | GAAAGT |
| 1367 | E1SaCas9KKH15 | exon1 | SaCas9KKH | + | ATCTGAGTCCTGTAGGGGGAAA | GTGAGT |
| 1368 | E1SaCas9KKH16 | exon1 | SaCas9KKH | + | TGAGTCCTGTAGGGGGAAAGTG | AGTGAT |
| 1369 | E1SaCas9KKH23 | exon1 | SaCas9KKH | − | TGGGAAGAAGTAGAGGACTGTT | GTAAGT |
| 1370 | E1SaCas9KKH24 | exon1 | SaCas9KKH | − | TTTTCAAAATGCTTTGGTGGGA | AGAAGT |
| 1371 | E1SaCas9KKH25 | exon1 | SaCas9KKH | − | TGATATACACTTTTCAAAATGC | TTTGGT |
| 1372 | E1SaCas9KKH26 | exon1 | SaCas9KKH | − | CGCTGCCTTGATATACACTTTT | CAAAAT |
| 1373 | E1SaCas9KKH27 | exon1 | SaCas9KKH | − | ACCAGGTTTTTTTTATCGCTGC | CTTGAT |
| 1374 | E1SaCas9KKH28 | exon1 | SaCas9KKH | − | AATAAAGTTTGAAGAACTTTTA | CCAGGT |
| 1375 | E1SaCas9KKH29 | exon1 | SaCas9KKH | − | GTTTTTAAGCCTACTGGAGCAA | TAAAGT |
| 1376 | E1SaCas9KKH30 | exon1 | SaCas9KKH | − | TCATTGTTTTTAAGCCTACTGG | AGCAAT |
| 1377 | E1SaCas9KKH31 | exon1 | SaCas9KKH | − | TTTTTTAAAGCTGCTGAAGTTT | GTTGGT |
| 1378 | E1SaCas9KKH32 | exon1 | SaCas9KKH | − | GTGTTACTTTTTTTAAAGCTGC | TGAAGT |
| 1379 | E1SaCas9KKH33 | exon1 | SaCas9KKH | − | GAGAAAAACGAATAGGAAAAAC | TGAAGT |
| 1380 | E1SaCas9KKH34 | exon1 | SaCas9KKH | − | AGGCAATTACCTTCGGAGAAAA | ACGAAT |
| 1381 | E1SaCas9KKH35 | exon1 | SaCas9KKH | − | CCTACAGGACTCAGATCTGGGA | GGCAAT |
| 1382 | E1SaCas9KKH36 | exon1 | SaCas9KKH | − | ACTCACTTTCCCCCTACAGGAC | TCAGAT |
| 1383 | E2SaCas9KKH1 | exon2 | SaCas9KKH | + | GTAACAAACCATTCTTACCTTA | GAAAAT |
| 1384 | E2SaCas9KKH2 | exon2 | SaCas9KKH | + | AAATTGTGCATTTACCCATTTT | GTGAAT |
| 1385 | E2SaCas9KKH3 | exon2 | SaCas9KKH | + | TTTGAACATCTTCTCTTTCATC | TAAAAT |
| 1386 | E2SaCas9KKH9 | exon2 | SaCas9KKH | − | TAAATGCACAATTTTCTAAGGT | AAGAAT |
| 1387 | E2SaCas9KKH10 | exon2 | SaCas9KKH | − | AATGGGTAAATGCACAATTTTC | TAAGGT |
| 1388 | E2SaCas9KKH11 | exon2 | SaCas9KKH | − | ACATTCACAAAATGGGTAAATG | CACAAT |
| 1389 | E2SaCas9KKH12 | exon2 | SaCas9KKH | − | AAAGAAAACATTCACAAAATGG | GTAAAT |
| 1390 | E2SaCas9KKH13 | exon2 | SaCas9KKH | | TTCAAAAGAAAACATTCACAAA | ATGGGT |
| 1391 | E2SaCas9KKH14 | exon2 | SaCas9KKH | − | GATGTTCAAAAGAAAACATTCA | CAAAAT |
| 1392 | E2SaCas9KKH15 | exon2 | SaCas9KKH | − | ATTTTGCATTTTAGATGAAAGA | GAAGAT |
| 1393 | E3SaCas9KKH2 | exon3 | SaCas9KKH | + | TTTTGCCCTGTCAGGCCTTCGA | GGAGGT |
| 1394 | E3SaCas9KKH3 | exon3 | SaCas9KKH | + | TCTAGGAGGCGCCTCCCATCCT | GTAGGT |
| 1395 | E3SaCas9KKH4 | exon3 | SaCas9KKH | + | CTCCCATCCTGTAGGTCACTGA | AGAGGT |
| 1396 | E3SaCas9KKH5 | exon3 | SaCas9KKH | + | CCTGTAGGTCACTGAAGAGGTT | CTCAAT |
| 1397 | E3SaCas9KKH6 | exon3 | SaCas9KKH | + | CTCAATATGCTGCTTCCCAAAC | TGAAAT |
| 1398 | E3SaCas9KKH10 | exon3 | SaCas9KKH | − | TCGAAGGCCTGACAGGGCAAAA | ACTGGT |
| 1399 | E3SaCas9KKH11 | exon3 | SaCas9KKH | − | TGAGAACCTCTTCAGTGACCTA | CAGGAT |
| 1400 | E3SaCas9KKH12 | exon3 | SaCas9KKH | − | GAAGCAGCATATTGAGAACCTC | TTCAGT |
| 1401 | E4SaCas9KKH1 | exon4 | SaCas9KKH | + | TACATTATTGTTCTGCAAAACC | CGCAGT |
| 1402 | E4SaCas9KKH2 | exon4 | SaCas9KKH | + | ATTGTTCAGGGCATGAACTCTT | GTGGAT |
| 1403 | E4SaCas9KKH6 | exon4 | SaCas9KKH | − | GGTTTTGCAGAACAATAATGTA | AGTAGT |
| 1404 | E4SaCas9KKH7 | exon4 | SaCas9KKH | − | GCGGGTTTTGCAGAACAATAAT | GTAAGT |
| 1405 | E4SaCas9KKH8 | exon4 | SaCas9KKH | − | GGCACTGCGGGTTTTGCAGAAC | AATAAT |
| 1406 | E4SaCas9KKH9 | exon4 | SaCas9KKH | − | CAAGGCACTGCGGGTTTTGCAG | AACAAT |
| 1407 | E4SaCas9KKH10 | exon4 | SaCas9KKH | − | TGAACAATGTCAACAAGGCACT | GCGGGT |
| 1408 | E4SaCas9KKH11 | exon4 | SaCas9KKH | − | ATCCACAAGAGTTCATGCCCTG | AACAAT |
| 1409 | E4SaCas9KKH12 | exon4 | SaCas9KKH | − | AGCCAAAAGAAAAAGGATCCAC | AAGAGT |
| 1410 | E4SaCas9KKH13 | exon4 | SaCas9KKH | − | TTTTGTTCTCAGCCAAAAGAAA | AAGGAT |
| 1411 | E5SaCas9KKH2 | exon5 | SaCas9KKH | + | TCAGGATTCTTACCTGCCAGTG | GAGGAT |
| 1412 | E5SaCas9KKH3 | exon5 | SaCas9KKH | + | CCTGCCAGTGGAGGATTATATT | CCAAAT |
| 1413 | E5SaCas9KKH4 | exon5 | SaCas9KKH | + | GGATTATATTCCAAATCAAACC | AAGAGT |
| 1414 | E5SaCas9KKH5 | exon5 | SaCas9KKH | + | TATATTCCAAATCAAACCAAGA | GTCAGT |
| 1415 | E5SaCas9KKH6 | exon5 | SaCas9KKH | + | CAAATCAAACCAAGAGTCAGTT | TATGAT |
| 1416 | E5SaCas9KKH7 | exon5 | SaCas9KKH | + | GAGTCAGTTTATGATTTCCATC | TACGAT |
| 1417 | E5SaCas9KKH8 | exon5 | SaCas9KKH | + | GTTTATGATTTCCATCTACGAT | GTCAGT |
| 1418 | E5SaCas9KKH9 | exon5 | SaCas9KKH | + | TTCCATCTACGATGTCAGTACT | TCCAAT |
| 1419 | E5SaCas9KKH10 | exon5 | SaCas9KKH | + | ATGTCAGTACTTCCAATATTCA | CTAAAT |
| 1420 | E5SaCas9KKH16 | exon5 | SaCas9KKH | − | ATATAATCCTCCACTGGCAGGT | AAGAAT |
| 1421 | E5SaCas9KKH17 | exon5 | SaCas9KKH | − | TTTGGAATATAATCCTCCACTG | GCAGGT |
| 1422 | E5SaCas9KKH18 | exon5 | SaCas9KKH | − | TGACTCTTGGTTTGATTTGGAA | TATAAT |
| 1423 | E5SaCas9KKH19 | exon5 | SaCas9KKH | − | TAAACTGACTCTTGGTTTGATT | TGGAAT |
| 1424 | E5SaCas9KKH20 | exon5 | SaCas9KKH | − | GAAATCATAAACTGACTCTTGG | TTTGAT |
| 1425 | E5SaCas9KKH21 | exon5 | SaCas9KKH | − | AGATGGAAATCATAAACTGACT | CTTGGT |
| 1426 | E5SaCas9KKH22 | exon5 | SaCas9KKH | − | TGGAAGTACTGACATCGTAGAT | GGAAAT |
| 1427 | E5SaCas9KKH23 | exon5 | SaCas9KKH | − | GAATATTGGAAGTACTGACATC | GTAGAT |
| 1428 | E5SaCas9KKH24 | exon5 | SaCas9KKH | − | ACAGGTTGATTTAGTGAATATT | GGAAGT |
| 1429 | E5SaCas9KKH25 | exon5 | SaCas9KKH | − | CTTTCTTTAACAGGTTGATTTA | GTGAAT |
| 1430 | E5SaCas9KKH26 | exon5 | SaCas9KKH | − | ACCCCTTTCTTTAACAGGTTGA | TTTAGT |
| 1431 | E6SaCas9KKH1 | exon6 | SaCas9KKH | + | AGTAATCTTCTTACCTATGACT | ATGGAT |
| 1432 | E6SaCas9KKH2 | exon6 | SaCas9KKH | + | TCAAAGCCAGGCCATCAGACCA | GCTGGT |
| 1433 | E6SaCas9KKH3 | exon6 | SaCas9KKH | + | AAGCCAGGCCATCAGACCAGCT | GGTGGT |
| 1434 | E6SaCas9KKH4 | exon6 | SaCas9KKH | + | AGGCCATCAGACCAGCTGGTGG | TGAAGT |
| 1435 | E6SaCas9KKH5 | exon6 | SaCas9KKH | + | CATCAGACCAGCTGGTGGTGAA | GTTGAT |
| 1436 | E6SaCas9KKH6 | exon6 | SaCas9KKH | + | GTGAAGTTGATTACATTAACCT | GTGGAT |
| 1437 | E6SaCas9KKH7 | exon6 | SaCas9KKH | + | AAGTTGATTACATTAACCTGTG | GATAAT |
| 1438 | E6SaCas9KKH8 | exon6 | SaCas9KKH | + | TTACATTAACCTGTGGATAATT | ACGAGT |
| 1439 | E6SaCas9KKH9 | exon6 | SaCas9KKH | + | ATTAACCTGTGGATAATTACGA | GTTGAT |
| 1440 | E6SaCas9KKH10 | exon6 | SaCas9KKH | + | TTGATTGTCGGACCCAGCTCAG | GAGAAT |
| 1441 | E6SaCas9KKH11 | exon6 | SaCas9KKH | + | AGCTCAGGAGAATCTTTTCACT | GTTGGT |
| 1442 | E6SaCas9KKH12 | exon6 | SaCas9KKH | + | AATCTTTTCACTGTTGGTTTGT | TGCAAT |
| 1443 | E6SaCas9KKH13 | exon6 | SaCas9KKH | + | TGTTGGTTTGTTGCAATCCAGC | CATGAT |
| 1444 | E6SaCas9KKH19 | exon6 | SaCas9KKH | − | TTGAATGCTCTCATCCATAGTC | ATAGGT |
| 1445 | E6SaCas9KKH20 | exon6 | SaCas9KKH | − | CCTGGCTTTGAATGCTCTCATC | CATAGT |
| 1446 | E6SaCas9KKH21 | exon6 | SaCas9KKH | − | CAGCTGGTCTGATGGCCTGGCT | TTGAAT |
| 1447 | E6SaCas9KKH22 | exon6 | SaCas9KKH | − | AATCAACTTCACCACCAGCTGG | TCTGAT |
| 1448 | E6SaCas9KKH23 | exon6 | SaCas9KKH | − | AATGTAATCAACTTCACCACCA | GCTGGT |
| 1449 | E6SaCas9KKH24 | exon6 | SaCas9KKH | − | CTCGTAATTATCCACAGGTTAA | TGTAAT |
| 1450 | E6SaCas9KKH25 | exon6 | SaCas9KKH | − | ATCAACTCGTAATTATCCACAG | GTTAAT |
| 1451 | E6SaCas9KKH26 | exon6 | SaCas9KKH | − | GACAATCAACTCGTAATTATCC | ACAGGT |
| 1452 | E6SaCas9KKH27 | exon6 | SaCas9KKH | − | GAGCTGGGTCCGACAATCAACT | CGTAAT |
| 1453 | E6SaCas9KKH28 | exon6 | SaCas9KKH | − | AAGATTCTCCTGAGCTGGGTCC | GACAAT |
| 1454 | E6SaCas9KKH29 | exon6 | SaCas9KKH | − | ACAGTGAAAAGATTCTCCTGAG | CTGGGT |
| 1455 | E6SaCas9KKH30 | exon6 | SaCas9KKH | − | GATTGCAACAAACCAACAGTGA | AAAGAT |
| 1456 | E6SaCas9KKH31 | exon6 | SaCas9KKH | − | CATGGCTGGATTGCAACAAACC | AACAGT |
| 1457 | E6SaCas9KKH32 | exon6 | SaCas9KKH | − | AATGTAATGAAAAATATCATGG | CTGGAT |
| 1458 | E6SaCas9KKH33 | exon6 | SaCas9KKH | − | CATGTAGGTCAAAAATGTAATG | AAAAAT |
| 1459 | E6SaCas9KKH34 | exon6 | SaCas9KKH | − | ATTTCCACATGTAGGTCAAAAA | TGTAAT |
| 1460 | E7SaCas9KKH1 | exon7 | SaCas9KKH | + | AGTCCAGAAATTTACCAACCTT | CAGGAT |
| 1461 | E7SaCas9KKH2 | exon7 | SaCas9KKH | + | AGAAATTTACCAACCTTCAGGA | TCGAGT |
| 1462 | E7SaCas9KKH3 | exon7 | SaCas9KKH | + | AATTTACCAACCTTCAGGATCG | AGTAGT |
| 1463 | E7SaCas9KKH4 | exon7 | SaCas9KKH | + | AGGATCGAGTAGTTTCTCTATG | CCTAAT |
| 1464 | E7SaCas9KKH5 | exon7 | SaCas9KKH | + | TCGAGTAGTTTCTCTATGCCTA | ATTGAT |
| 1465 | E7SaCas9KKH6 | exon7 | SaCas9KKH | + | TCTCTATGCCTAATTGATATCT | GGCGAT |
| 1466 | E7SaCas9KKH7 | exon7 | SaCas9KKH | + | GCCTAATTGATATCTGGCGATG | TTGAAT |
| 1467 | E7SaCas9KKH8 | exon7 | SaCas9KKH | + | TCTGGCGATGTTGAATGCATGT | TCCAGT |
| 1468 | E7SaCas9KKH9 | exon7 | SaCas9KKH | + | GACTGCTGGCAAACCACACTAT | TCCAGT |
| 1469 | E7SaCas9KKH10 | exon7 | SaCas9KKH | + | CTGGCAAACCACACTATTCCAG | TCAAAT |
| 1470 | E7SaCas9KKH11 | exon7 | SaCas9KKH | + | CAAACCACACTATTCCAGTCAA | ATAGGT |
| 1471 | E7SaCas9KKH13 | exon7 | SaCas9KKH | − | GAGAAACTACTCGATCCTGAAG | GTTGGT |
| 1472 | E7SaCas9KKH14 | exon7 | SaCas9KKH | − | CATAGAGAAACTACTCGATCCT | GAAGGT |
| 1473 | E7SaCas9KKH15 | exon7 | SaCas9KKH | − | TCAATTAGGCATAGAGAAACTA | CTCGAT |
| 1474 | E7SaCas9KKH16 | exon7 | SaCas9KKH | − | CATGCATTCAACATCGCCAGAT | ATCAAT |
| 1475 | E7SaCas9KKH17 | exon7 | SaCas9KKH | − | CTGGAACATGCATTCAACATCG | CCAGAT |
| 1476 | E7SaCas9KKH18 | exon7 | SaCas9KKH | − | GACTGGAATAGTGTGGTTTGCC | AGCAGT |
| 1477 | E7SaCas9KKH19 | exon7 | SaCas9KKH | − | CAGACCTATTTGACTGGAATAG | TGTGGT |
| 1478 | E7SaCas9KKH20 | exon7 | SaCas9KKH | − | TAGGCCAGACCTATTTGACTGG | AATAGT |
| 1479 | E7SaCas9KKH21 | exon7 | SaCas9KKH | − | TTTTAGGCCAGACCTATTTGAC | TGGAAT |
| 1480 | E8SaCas9KKH1 | exon8 | SaCas9KKH | + | TCCTTTACACACTTTACCTGTT | GAGAAT |
| 1481 | E8SaCas9KKH2 | exon8 | SaCas9KKH | + | TTTACACACTTTACCTGTTGAG | AATAGT |
| 1482 | E8SaCas9KKH3 | exon8 | SaCas9KKH | + | TTTACCTGTTGAGAATAGTGCA | TTTGAT |
| 1483 | E8SaCas9KKH4 | exon8 | SaCas9KKH | + | ACCTGTTGAGAATAGTGCATTT | GATGAT |
| 1484 | E8SaCas9KKH5 | exon8 | SaCas9KKH | + | TAGTGCATTTGATGATGTAACT | GAAAAT |
| 1485 | E8SaCas9KKH6 | exon8 | SaCas9KKH | + | GATGTAACTGAAAATGTTCTTC | TTTAGT |
| 1486 | E8SaCas9KKH7 | exon8 | SaCas9KKH | + | AAAATGTTCTTCTTTAGTCACT | TTAGGT |
| 1487 | E8SaCas9KKH8 | exon8 | SaCas9KKH | + | GCCTTGGCAACATTTCCACTTC | CTGGAT |
| 1488 | E8SaCas9KKH9 | exon8 | SaCas9KKH | + | ACATTTCCACTTCCTGGATGGC | TTCAAT |
| 1489 | E8SaCas9KKH10 | exon8 | SaCas9KKH | + | CACTTGTTGAGGCAAAACTTGG | AAGAGT |
| 1490 | E8SaCas9KKH11 | exon8 | SaCas9KKH | + | TTGTTGAGGCAAAACTTGGAAG | AGTGAT |
| 1491 | E8SaCas9KKH12 | exon8 | SaCas9KKH | + | GAGGCAAAACTTGGAAGAGTGA | TGTGAT |
| 1492 | E8SaCas9KKH13 | exon8 | SaCas9KKH | + | GGAAGAGTGATGTGATGTACAT | TAAGAT |
| 1493 | E8SaCas9KKH14 | exon8 | SaCas9KKH | + | TACATTAAGATGGACTTCTTAT | CTGGAT |
| 1494 | E8SaCas9KKH15 | exon8 | SaCas9KKH | + | TTAAGATGGACTTCTTATCTGG | ATAGGT |
| 1495 | E8SaCas9KKH16 | exon8 | SaCas9KKH | + | AGATGGACTTCTTATCTGGATA | GGTGGT |
| 1496 | E8SaCas9KKH18 | exon8 | SaCas9KKH | − | CAAATGCACTATTCTCAACAGG | TAAAGT |
| 1497 | E8SaCas9KKH19 | exon8 | SaCas9KKH | − | ATCATCAAATGCACTATTCTCA | ACAGGT |
| 1498 | E8SaCas9KKH20 | exon8 | SaCas9KKH | − | AAGAACATTTTCAGTTACATCA | TCAAAT |
| 1499 | E8SaCas9KKH21 | exon8 | SaCas9KKH | − | AAAGTGACTAAAGAAGAACATT | TTCAGT |
| 1500 | E8SaCas9KKH22 | exon8 | SaCas9KKH | − | TGGAAATGTTGCCAAGGCCACC | TAAAGT |
| 1501 | E8SaCas9KKH23 | exon8 | SaCas9KKH | − | GCATTGAAGCCATCCAGGAAGT | GGAAAT |
| 1502 | E8SaCas9KKH24 | exon8 | SaCas9KKH | − | AAGTGAGCATTGAAGCCATCCA | GGAAGT |
| 1503 | E8SaCas9KKH25 | exon8 | SaCas9KKH | − | CACTCTTCCAAGTTTTGCCTCA | ACAAGT |
| 1504 | E8SaCas9KKH26 | exon8 | SaCas9KKH | − | TAATGTACATCACATCACTCTT | CCAAGT |
| 1505 | E8SaCas9KKH27 | exon8 | SaCas9KKH | − | CCTATCCAGATAAGAAGTCCAT | CTTAAT |
| 1506 | E8SaCas9KKH28 | exon8 | SaCas9KKH | − | GTTGATACCACCTATCCAGATA | AGAAGT |
| 1507 | E8SaCas9KKH29 | exon8 | SaCas9KKH | − | TACAGATGTTGATACCACCTAT | CCAGAT |
| 1508 | E9SaCas9KKH1 | exon9 | SaCas9KKH | + | TAAATGTTGACAGACCTGTGAA | GGAAAT |
| 1509 | E9SaCas9KKH2 | exon9 | SaCas9KKH | + | TGTGAAGGAAATGGGCTCCGTG | TAGGGT |
| 1510 | E9SaCas9KKH3 | exon9 | SaCas9KKH | + | GAAATGGGCTCCGTGTAGGGTC | AGAGGT |
| 1511 | E9SaCas9KKH4 | exon9 | SaCas9KKH | + | ATGGGCTCCGTGTAGGGTCAGA | GGTGGT |
| 1512 | E9SaCas9KKH5 | exon9 | SaCas9KKH | + | AGCCTGTGTGTAGGCATAGCTC | TTGAAT |
| 1513 | E9SaCas9KKH6 | exon9 | SaCas9KKH | + | TCTTGAATCGAGGCTTAGGGGA | AGAAGT |
| 1514 | E9SaCas9KKH7 | exon9 | SaCas9KKH | + | CATATCCCTGTGCTAGACTGAC | CGTGAT |
| 1515 | E9SaCas9KKH11 | exon9 | SaCas9KKH | − | CTACACGGAGCCCATTTCCTTC | ACAGGT |
| 1516 | E9SaCas9KKH12 | exon9 | SaCas9KKH | − | GAGAGAACTTCTTCCCCTAAGC | CTCGAT |
| 1517 | E9SaCas9KKH13 | exon9 | SaCas9KKH | − | CAGATCACGGTCAGTCTAGCAC | AGGGAT |
| 1518 | E9SaCas9KKH14 | exon9 | SaCas9KKH | − | AAACCCTTCTCTGCAGATCACG | GTCAGT |
| 1519 | E10SaCas9KKH2 | exon10 | SaCas9KKH | + | AATTAACGTTTTAGTTTACCTC | ATGAGT |
| 1520 | E10SaCas9KKH3 | exon10 | SaCas9KKH | + | TAGTTTACCTCATGAGTATGAA | ACTGGT |
| 1521 | E10SaCas9KKH4 | exon10 | SaCas9KKH | + | CTTTCACCACTTCCACATCATT | AGAAAT |
| 1522 | E10SaCas9KKH5 | exon10 | SaCas9KKH | + | ATTAGAAATCTCTCCTTGTGCT | TGCAAT |
| 1523 | E10SaCas9KKH6 | exon10 | SaCas9KKH | + | TGTGTCCTCAGCAGAAAGAAGC | CACGAT |
| 1524 | E10SaCas9KKH7 | exon10 | SaCas9KKH | + | GTCCTCAGCAGAAAGAAGCCAC | GATAAT |
| 1525 | E10SaCas9KKH8 | exon10 | SaCas9KKH | + | GATAATACTTCTTCTAAAGCTG | TTTGAT |
| 1526 | E10SaCas9KKH9 | exon10 | SaCas9KKH | + | ACTTCTTCTAAAGCTGTTTGAT | AACGGT |
| 1527 | E10SaCas9KKH10 | exon10 | SaCas9KKH | + | TCTAAAGCTGTTTGATAACGGT | CCAGGT |
| 1528 | E10SaCas9KKH11 | exon10 | SaCas9KKH | + | GTCCAGGTTTACTTCACTCTCC | ATCAAT |
| 1529 | E10SaCas9KKH12 | exon10 | SaCas9KKH | + | TTCACTCTCCATCAATGAACTG | CCAAAT |
| 1530 | E10SaCas9KKH13 | exon10 | SaCas9KKH | + | AATGACTTGTCTTCAGGAGCTT | CCAAAT |
| 1531 | E10SaCas9KKH19 | exon10 | SaCas9KKH | − | TGAAAGACCAGTTTCATACTCA | TGAGGT |
| 1532 | E10SaCas9KKH20 | exon10 | SaCas9KKH | − | AATGATGTGGAAGTGGTGAAAG | ACCAGT |
| 1533 | E10SaCas9KKH21 | exon10 | SaCas9KKH | − | GAGAGATTTCTAATGATGTGGA | AGTGGT |
| 1534 | E10SaCas9KKH22 | exon10 | SaCas9KKH | − | AAGGAGAGATTTCTAATGATGT | GGAAGT |
| 1535 | E10SaCas9KKH23 | exon10 | SaCas9KKH | − | GCAAGCACAAGGAGAGATTTCT | AATGAT |
| 1536 | E10SaCas9KKH24 | exon10 | SaCas9KKH | − | ATTGCAAGCACAAGGAGAGATT | TCTAAT |
| 1537 | E10SaCas9KKH25 | exon10 | SaCas9KKH | − | AGGACACATTGCAAGCACAAGG | AGAGAT |
| 1538 | E10SaCas9KKH26 | exon10 | SaCas9KKH | − | ACCGTTATCAAACAGCTTTAGA | AGAAGT |
| 1539 | E10SaCas9KKH27 | exon10 | SaCas9KKH | − | TTGGCAGTTCATTGATGGAGAG | TGAAGT |
| 1540 | E10SaCas9KKH28 | exon10 | SaCas9KKH | − | GTCATTTGGCAGTTCATTGATG | GAGAGT |
| 1541 | E10SaCas9KKH29 | exon10 | SaCas9KKH | − | AAGACAAGTCATTTGGCAGTTC | ATTGAT |
| 1542 | E10SaCas9KKH30 | exon10 | SaCas9KKH | − | AGCTCCTGAAGACAAGTCATTT | GGCAGT |
| 1543 | E10SaCas9KKH31 | exon10 | SaCas9KKH | − | CAGCATTTGGAAGCTCCTGAAG | ACAAGT |
| 1544 | E11SaCas9KKH1 | exon11 | SaCas9KKH | + | GCTACCCTGAGGCATTCCCATC | TTGAAT |
| 1545 | E11SaCas9KKH2 | exon11 | SaCas9KKH | + | AGGCATTCCCATCTTGAATTTA | GGAGAT |
| 1546 | E11SaCas9KKH3 | exon11 | SaCas9KKH | + | GGAGATTCATCTGCTCTTGTAC | TTCAGT |
| 1547 | E11SaCas9KKH4 | exon11 | SaCas9KKH | + | TTGTACTTCAGTTTCTTCATCT | TCTGAT |
| 1548 | E11SaCas9KKH5 | exon11 | SaCas9KKH | + | TACTTCAGTTTCTTCATCTTCT | GATAAT |
| 1549 | E11SaCas9KKH6 | exon11 | SaCas9KKH | + | CATCTTCTGATAATTTTCCTGT | TCCAAT |
| 1550 | E11SaCas9KKH7 | exon11 | SaCas9KKH | + | TCCTGTTCCAATCAGCTTACTT | CCCAAT |
| 1551 | E11SaCas9KKH8 | exon11 | SaCas9KKH | + | CAATCAGCTTACTTCCCAATTG | TAGAAT |
| 1552 | E11SaCas9KKH9 | exon11 | SaCas9KKH | + | TGTAGAATATTACCAACCCGGC | CCTGAT |
| 1553 | E11SaCas9KKH10 | exon11 | SaCas9KKH | + | CCAACCCGGCCCTGATGGGCTG | TCAAAT |
| 1554 | E11SaCas9KKH15 | exon11 | SaCas9KKH | − | CTAGCATGGAAAAACAAAGCAA | GTAAGT |
| 1555 | E11SaCas9KKH16 | exon11 | SaCas9KKH | − | GTAGCTAGCATGGAAAAACAAA | GCAAGT |
| 1556 | E11SaCas9KKH17 | exon11 | SaCas9KKH | − | TAAATTCAAGATGGGAATGCCT | CAGGGT |
| 1557 | E11SaCas9KKH18 | exon11 | SaCas9KKH | − | ATGAATCTCCTAAATTCAAGAT | GGGAAT |
| 1558 | E11SaCas9KKH19 | exon11 | SaCas9KKH | − | GAGCAGATGAATCTCCTAAATT | CAAGAT |
| 1559 | E11SaCas9KKH20 | exon11 | SaCas9KKH | − | AGTACAAGAGCAGATGAATCTC | CTAAAT |
| 1560 | E11SaCas9KKH21 | exon11 | SaCas9KKH | − | AGAAACTGAAGTACAAGAGCAG | ATGAAT |
| 1561 | E11SaCas9KKH22 | exon11 | SaCas9KKH | − | ATGAAGAAACTGAAGTACAAGA | GCAGAT |
| 1562 | E11SaCas9KKH23 | exon11 | SaCas9KKH | − | AATTATCAGAAGATGAAGAAAC | TGAAGT |
| 1563 | E11SaCas9KKH24 | exon11 | SaCas9KKH | − | GATTGGAACAGGAAAATTATCA | GAAGAT |
| 1564 | E11SaCas9KKH25 | exon11 | SaCas9KKH | − | GGAAGTAAGCTGATTGGAACAG | GAAAAT |
| 1565 | E11SaCas9KKH26 | exon11 | SaCas9KKH | − | ATATTCTACAATTGGGAAGTAA | GCTGAT |
| 1566 | E11SaCas9KKH27 | exon11 | SaCas9KKH | − | GGTTGGTAATATTCTACAATTG | GGAAGT |
| 1567 | E11SaCas9KKH28 | exon11 | SaCas9KKH | − | CAGGGCCGGGTTGGTAATATTC | TACAAT |
| 1568 | E11SaCas9KKH29 | exon11 | SaCas9KKH | − | GACAGCCCATCAGGGCCGGGTT | GGTAAT |
| 1569 | E11SaCas9KKH30 | exon11 | SaCas9KKH | − | TTTGACAGCCCATCAGGGCCGG | GTTGGT |
| 1570 | E11SaCas9KKH31 | exon11 | SaCas9KKH | − | TGGATTTGACAGCCCATCAGGG | CCGGGT |
| 1571 | E11SaCas9KKH32 | exon11 | SaCas9KKH | − | CCTTCTTTGTCAGGGGTACATG | ATGGAT |
| 1572 | E11SaCas9KKH33 | exon11 | SaCas9KKH | − | ACTTCCTTCTTTGTCAGGGGTA | CATGAT |
| 1573 | E12SaCas9KKH1 | exon12 | SaCas9KKH | + | TTATGTTGTTGTACTTGGCGTT | TTAGGT |
| 1574 | E12SaCas9KKH2 | exon12 | SaCas9KKH | + | TGTACTTGGCGTTTTAGGTCTT | CAAGAT |
| 1575 | E12SaCas9KKH3 | exon12 | SaCas9KKH | + | TTGGCGTTTTAGGTCTTCAAGA | TCAGGT |
| 1576 | E12SaCas9KKH4 | exon12 | SaCas9KKH | + | GTTCTTTCTTCTGTTTTTGTTA | GCCAGT |
| 1577 | E12SaCas9KKH5 | exon12 | SaCas9KKH | + | TGTTAGCCAGTCATTCAACTCT | TTCAGT |
| 1578 | E12SaCas9KKH6 | exon12 | SaCas9KKH | + | CAGTCATTCAACTCTTTCAGTT | TCTGAT |
| 1579 | E12SaCas9KKH7 | exon12 | SaCas9KKH | + | AACTCTTTCAGTTTCTGATTCT | GGAGAT |
| 1580 | E12SaCas9KKH8 | exon12 | SaCas9KKH | + | CCATTAAAACTCTATGTAAACT | GAAAAT |
| 1581 | E12SaCas9KKH9 | exon12 | SaCas9KKH | − | ACGCCAAGTACAACAACATAAG | GTAGGT |
| 1582 | E12SaCas9KKH10 | exon12 | SaCas9KKH | − | TAAAACGCCAAGTACAACAACA | TAAGGT |
| 1583 | E12SaCas9KKH11 | exon12 | SaCas9KKH | − | CTGATCTTGAAGACCTAAAACG | CCAAGT |
| 1584 | E12SaCas9KKH12 | exon12 | SaCas9KKH | − | AATGGAGGAAGAGCCTCTTGGA | CCTGAT |
| 1585 | E12SaCas9KKH13 | exon12 | SaCas9KKH | − | CAAAAACAGAAGAAAGAACAAG | GAAAAT |
| 1586 | E12SaCas9KKH14 | exon12 | SaCas9KKH | − | CCAGAATCAGAAACTGAAAGAG | TTGAAT |
| 1587 | E12SaCas9KKH15 | exon12 | SaCas9KKH | − | GATCTCCAGAATCAGAAACTGA | AAGAGT |
| 1588 | E12SaCas9KKH16 | exon12 | SaCas9KKH | − | ACATAGAGTTTTAATGGATCTC | CAGAAT |
| 1589 | E12SaCas9KKH17 | exon12 | SaCas9KKH | − | TTTCAGTTTACATAGAGTTTTA | ATGGAT |
| 1590 | E12SaCas9KKH18 | exon12 | SaCas9KKH | − | AAATTTTCAGTTTACATAGAGT | TTTAAT |
| 1591 | E12SaCas9KKH19 | exon12 | SaCas9KKH | − | TCTTTCAAATTTTCAGTTTACA | TAGAGT |
| 1592 | E13SaCas9KKH2 | exon13 | SaCas9KKH | + | CCTTAAGTTGTTCTTCCAAAGC | AGCAGT |
| 1593 | E13SaCas9KKH3 | exon13 | SaCas9KKH | + | TGTTCTTCCAAAGCAGCAGTTG | CGTGAT |
| 1594 | E13SaCas9KKH4 | exon13 | SaCas9KKH | + | AGCAGCAGTTGCGTGATCTCCA | CTAGAT |
| 1595 | E13SaCas9KKH5 | exon13 | SaCas9KKH | + | ATTCATCAACTACCACCACCAT | GTGAGT |
| 1596 | E13SaCas9KKH6 | exon13 | SaCas9KKH | + | ACTACCACCACCATGTGAGTGA | GAGAAT |
| 1597 | E13SaCas9KKH7 | exon13 | SaCas9KKH | + | TTGACCCTGACTTGTTCTTGTT | CTAGAT |
| 1598 | E13SaCas9KKH13 | exon13 | SaCas9KKH | − | GCTTTGGAAGAACAACTTAAGG | TCAGAT |
| 1599 | E13SaCas9KKH14 | exon13 | SaCas9KKH | − | CTGCTGCTTTGGAAGAACAACT | TAAGGT |
| 1600 | E13SaCas9KKH15 | exon13 | SaCas9KKH | − | GGTGGTAGTTGATGAATCTAGT | GGAGAT |
| 1601 | E13SaCas9KKH16 | exon13 | SaCas9KKH | − | CATGGTGGTGGTAGTTGATGAA | TCTAGT |
| 1602 | E13SaCas9KKH17 | exon13 | SaCas9KKH | − | ACTCACATGGTGGTGGTAGTTG | ATGAAT |
| 1603 | E13SaCas9KKH18 | exon13 | SaCas9KKH | − | TCTCACTCACATGGTGGTGGTA | GTTGAT |
| 1604 | E13SaCas9KKH19 | exon13 | SaCas9KKH | − | ATTCTCTCACTCACATGGTGGT | GGTAGT |
| 1605 | E13SaCas9KKH20 | exon13 | SaCas9KKH | − | TCAATTCTCTCACTCACATGGT | GGTGGT |
| 1606 | E13SaCas9KKH21 | exon13 | SaCas9KKH | − | GGGTCAATTCTCTCACTCACAT | GGTGGT |
| 1607 | E13SaCas9KKH22 | exon13 | SaCas9KKH | − | TCAGGGTCAATTCTCTCACTCA | CATGGT |
| 1608 | E13SaCas9KKH23 | exon13 | SaCas9KKH | − | TCTAGAACAAGAACAAGTCAGG | GTCAAT |
| 1609 | E13SaCas9KKH24 | exon13 | SaCas9KKH | − | AAGATCTAGAACAAGAACAAGT | CAGGGT |
| 1610 | E13SaCas9KKH25 | exon13 | SaCas9KKH | − | TTCAAGAAGATCTAGAACAAGA | ACAAGT |
| 1611 | E13SaCas9KKH26 | exon13 | SaCas9KKH | − | TTTTATCTTTCAGGTGCTTCAA | GAAGAT |
| 1612 | E14SaCas9KKH1 | exon14 | SaCas9KKH | + | CTCACACATGACACACCTGTTC | TTCAGT |
| 1613 | E14SaCas9KKH2 | exon14 | SaCas9KKH | + | CAGTAAGACGTTGCCATTTGAG | AAGGAT |
| 1614 | E14SaCas9KKH3 | exon14 | SaCas9KKH | + | AGGATGTCTTGTAAAAGAACCC | AGCGGT |
| 1615 | E14SaCas9KKH4 | exon14 | SaCas9KKH | + | CCCAGCGGTCTTCTGTCCATCT | ACAGAT |
| 1616 | E14SaCas9KKH5 | exon14 | SaCas9KKH | + | GTCCATCTACAGATGTTTGCCC | ATCGAT |
| 1617 | E14SaCas9KKH6 | exon14 | SaCas9KKH | + | ACAGATGTTTGCCCATCGATCT | CCCAAT |
| 1618 | E14SaCas9KKH8 | exon14 | SaCas9KKH | − | AATGGCAACGTCTTACTGAAGA | ACAGGT |
| 1619 | E14SaCas9KKH9 | exon14 | SaCas9KKH | − | GTTCTTTTACAAGACATCCTTC | TCAAAT |
| 1620 | E14SaCas9KKH10 | exon14 | SaCas9KKH | − | TCTGTAGATGGACAGAAGACCG | CTGGGT |
| 1621 | E14SaCas9KKH11 | exon14 | SaCas9KKH | − | GGAGATCGATGGGCAAACATCT | GTAGAT |
| 1622 | E14SaCas9KKH12 | exon14 | SaCas9KKH | − | TCTCTTCTCCAGGTATTGGGAG | ATCGAT |
| 1623 | E14SaCas9KKH13 | exon14 | SaCas9KKH | − | ATTGTCTCTTCTCCAGGTATTG | GGAGAT |
| 1624 | E15SaCas9KKH2 | exon15 | SaCas9KKH | + | ACATACGGCCAGTTTTTGAAGA | CTTGAT |
| 1625 | E15SaCas9KKH3 | exon15 | SaCas9KKH | + | TGAAGACTTGATAACATTTCAT | TTTGAT |
| 1626 | E15SaCas9KKH4 | exon15 | SaCas9KKH | + | ACATTTCATTTTGATCTTTAAA | GCCAGT |
| 1627 | E15SaCas9KKH5 | exon15 | SaCas9KKH | + | TTTGATCTTTAAAGCCAGTTGT | GTGAAT |
| 1628 | E15SaCas9KKH10 | exon15 | SaCas9KKH | − | TAAAGATCAAAATGAAATGTTA | TCAAGT |
| 1629 | E15SaCas9KKH11 | exon15 | SaCas9KKH | − | CAACTGGCTTTAAAGATCAAAA | TGAAAT |
| 1630 | E15SaCas9KKH12 | exon15 | SaCas9KKH | − | TCACACAACTGGCTTTAAAGAT | CAAAAT |
| 1631 | E15SaCas9KKH13 | exon15 | SaCas9KKH | − | CAAGATTCACACAACTGGCTTT | AAAGAT |
| 1632 | E15SaCas9KKH14 | exon15 | SaCas9KKH | − | CAGAAAAAGAAGATGCAGTGAA | CAAGAT |
| 1633 | E15SaCas9KKH15 | exon15 | SaCas9KKH | − | CATGGCTTTCAGAAAAAGAAGA | TGCAGT |
| 1634 | E15SaCas9KKH16 | exon15 | SaCas9KKH | − | TAGTGCATGGCTTTCAGAAAAA | GAAGAT |
| 1635 | E15SaCas9KKH17 | exon15 | SaCas9KKH | − | CTTTAATGTCTTGCAGTGCCTT | TTTAGT |
| 1636 | E16SaCas9KKH1 | exon16 | SaCas9KKH | + | ACTAACCTGTGCTGTACTCTTT | TCAAGT |
| 1637 | E16SaCas9KKH2 | exon16 | SaCas9KKH | + | GTACTCTTTTCAAGTTTTTGGA | CTAAAT |
| 1638 | E16SaCas9KKH3 | exon16 | SaCas9KKH | + | ACTAAATTATCCCAACACCGGG | CAAAGT |
| 1639 | E16SaCas9KKH4 | exon16 | SaCas9KKH | + | TATCCAGCCATGCTTCCGTCTT | CTGGGT |
| 1640 | E16SaCas9KKH5 | exon16 | SaCas9KKH | + | CTTCTGGGTCACTGACTTATTC | TTCAGT |
| 1641 | E16SaCas9KKH6 | exon16 | SaCas9KKH | + | GACTTATTCTTCAGTGTTGAAA | GAAGAT |
| 1642 | E16SaCas9KKH7 | exon16 | SaCas9KKH | + | CAGTGTTGAAAGAAGATCTTGT | TTGAGT |
| 1643 | E16SaCas9KKH8 | exon16 | SaCas9KKH | + | GTTGAAAGAAGATCTTGTTTGA | GTGAAT |
| 1644 | E16SaCas9KKH9 | exon16 | SaCas9KKH | + | AAGAAGATCTTGTTTGAGTGAA | TACAGT |
| 1645 | E16SaCas9KKH10 | exon16 | SaCas9KKH | + | TTTGAGTGAATACAGTTTGCCC | ATGGAT |
| 1646 | E16SaCas9KKH11 | exon16 | SaCas9KKH | + | CCCATGGATTGCTTTTTCTTTT | CTAGAT |
| 1647 | E16SaCas9KKH15 | exon16 | SaCas9KKH | − | TGAAAAGAGTACAGCACAGGTT | AGTGAT |
| 1648 | E16SaCas9KKH16 | exon16 | SaCas9KKH | − | ACTTGAAAAGAGTACAGCACAG | GTTAGT |
| 1649 | E16SaCas9KKH17 | exon16 | SaCas9KKH | − | AAAAACTTGAAAAGAGTACAGC | ACAGGT |
| 1650 | E16SaCas9KKH18 | exon16 | SaCas9KKH | − | TAATTTAGTCCAAAAACTTGAA | AAGAGT |
| 1651 | E16SaCas9KKH19 | exon16 | SaCas9KKH | − | ACTTTGCCCGGTGTTGGGATAA | TTTAGT |
| 1652 | E16SaCas9KKH20 | exon16 | SaCas9KKH | − | GGATAACTTTGCCCGGTGTTGG | GATAAT |
| 1653 | E16SaCas9KKH21 | exon16 | SaCas9KKH | − | GCTGGATAACTTTGCCCGGTGT | TGGGAT |
| 1654 | E16SaCas9KKH22 | exon16 | SaCas9KKH | − | GAAGCATGGCTGGATAACTTTG | CCCGGT |
| 1655 | E16SaCas9KKH23 | exon16 | SaCas9KKH | − | GACCCAGAAGACGGAAGCATGG | CTGGAT |
| 1656 | E16SaCas9KKH24 | exon16 | SaCas9KKH | − | TTCTTTCAACACTGAAGAATAA | GTCAGT |
| 1657 | E16SaCas9KKH25 | exon16 | SaCas9KKH | − | GATCTTCTTTCAACACTGAAGA | ATAAGT |
| 1658 | E16SaCas9KKH26 | exon16 | SaCas9KKH | − | ACAAGATCTTCTTTCAACACTG | AAGAAT |
| 1659 | E16SaCas9KKH27 | exon16 | SaCas9KKH | − | GGGCAAACTGTATTCACTCAAA | CAAGAT |
| 1660 | E16SaCas9KKH28 | exon16 | SaCas9KKH | − | AAAGCGGATCTAGAAAAGAAAA | AGCAAT |
| 1661 | E16SaCas9KKH29 | exon16 | SaCas9KKH | − | CTTGTTTTAACAGGTTTTAAAA | GCGGAT |
| 1662 | E17SaCas9KKH1 | exon17 | SaCas9KKH | + | GCTTAAGATGCTCTCACCTTTT | CCTAAT |
| 1663 | E17SaCas9KKH2 | exon17 | SaCas9KKH | + | TGCTCTCACCTTTTCCTAATTT | CAGAAT |
| 1664 | E17SaCas9KKH3 | exon17 | SaCas9KKH | + | ACCTTTTCCTAATTTCAGAATC | CACAGT |
| 1665 | E17SaCas9KKH4 | exon17 | SaCas9KKH | + | TTTTCCTAATTTCAGAATCCAC | AGTAAT |
| 1666 | E17SaCas9KKH5 | exon17 | SaCas9KKH | + | AGTAATCTGCCTCTTCTTTTGG | GGAGGT |
| 1667 | E17SaCas9KKH6 | exon17 | SaCas9KKH | + | AATCTGCCTCTTCTTTTGGGGA | GGTGGT |
| 1668 | E17SaCas9KKH7 | exon17 | SaCas9KKH | + | CTGCCTCTTCTTTTGGGGAGGT | GGTGGT |
| 1669 | E17SaCas9KKH8 | exon17 | SaCas9KKH | + | CTTCTTTTGGGGAGGTGGTGGT | GGAAGT |
| 1670 | E17SaCas9KKH9 | exon17 | SaCas9KKH | + | GTTCCTCTTGAGCATGCTTTAC | CAGGAT |
| 1671 | E17SaCas9KKH10 | exon17 | SaCas9KKH | + | GCTTTACCAGGATCTGTTCCCT | TGTGGT |
| 1672 | E17SaCas9KKH11 | exon17 | SaCas9KKH | + | GGATCTGTTCCCTTGTGGTCAC | CGTAGT |
| 1673 | E17SaCas9KKH12 | exon17 | SaCas9KKH | + | TCACCGTAGTTACTGTTTCCAT | TACAGT |
| 1674 | E17SaCas9KKH13 | exon17 | SaCas9KKH | + | TGTTTCCATTACAGTTGTCTGT | GTTAGT |
| 1675 | E17SaCas9KKH14 | exon17 | SaCas9KKH | + | TTCCATTACAGTTGTCTGTGTT | AGTGAT |
| 1676 | E17SaCas9KKH15 | exon17 | SaCas9KKH | + | CAGTTGTCTGTGTTAGTGATGG | CTGAGT |
| 1677 | E17SaCas9KKH16 | exon17 | SaCas9KKH | + | TTGTCTGTGTTAGTGATGGCTG | AGTGGT |
| 1678 | E17SaCas9KKH17 | exon17 | SaCas9KKH | + | TCTGTGTTAGTGATGGCTGAGT | GGTGGT |
| 1679 | E17SaCas9KKH18 | exon17 | SaCas9KKH | + | GCTGAGTGGTGGTGACAGCCTG | TGAAAT |
| 1680 | E17SaCas9KKH22 | exon17 | SaCas9KKH | − | ACTGTGGATTCTGAAATTAGGA | AAAGGT |
| 1681 | E17SaCas9KKH23 | exon17 | SaCas9KKH | − | AGAGGCAGATTACTGTGGATTC | TGAAAT |
| 1682 | E17SaCas9KKH24 | exon17 | SaCas9KKH | − | CCAAAAGAAGAGGCAGATTACT | GTGGAT |
| 1683 | E17SaCas9KKH25 | exon17 | SaCas9KKH | − | CACCACCTCCCCAAAAGAAGAG | GCAGAT |
| 1684 | E17SaCas9KKH26 | exon17 | SaCas9KKH | − | CGGTGACCACAAGGGAACAGAT | CCTGGT |
| 1685 | E17SaCas9KKH27 | exon17 | SaCas9KKH | − | TAACTACGGTGACCACAAGGGA | ACAGAT |
| 1686 | E17SaCas9KKH28 | exon17 | SaCas9KKH | − | CAACTGTAATGGAAACAGTAAC | TACGGT |
| 1687 | E17SaCas9KKH29 | exon17 | SaCas9KKH | − | TAACACAGACAACTGTAATGGA | AACAGT |
| 1688 | E17SaCas9KKH30 | exon17 | SaCas9KKH | − | AGCCATCACTAACACAGACAAC | TGTAAT |
| 1689 | E18SaCas9KKH1 | exon18 | SaCas9KKH | + | TAACCTACATTGACTTTTTCTT | TTAAGT |
| 1690 | E18SaCas9KKH2 | exon18 | SaCas9KKH | + | TTGACTTTTTCTTTTAAGTCTG | AGAAGT |
| 1691 | E18SaCas9KKH3 | exon18 | SaCas9KKH | + | CTGAGAAGTTGCCTTCCTTCCG | AAAGAT |
| 1692 | E18SaCas9KKH4 | exon18 | SaCas9KKH | + | GTTGCCTTCCTTCCGAAAGATT | GCAAAT |
| 1693 | E18SaCas9KKH5 | exon18 | SaCas9KKH | + | GACTCTGCAACACAGCTTCTGA | GCGAGT |
| 1694 | E18SaCas9KKH6 | exon18 | SaCas9KKH | + | TCTGCAACACAGCTTCTGAGCG | AGTAAT |
| 1695 | E18SaCas9KKH7 | exon18 | SaCas9KKH | + | TTCTGAGCGAGTAATCCAGCTG | TGAAGT |
| 1696 | E18SaCas9KKH8 | exon18 | SaCas9KKH | + | AGCGAGTAATCCAGCTGTGAAG | TTCAGT |
| 1697 | E18SaCas9KKH12 | exon18 | SaCas9KKH | − | AGACTTAAAAGAAAAAGTCAAT | GTAGGT |
| 1698 | E18SaCas9KKH13 | exon18 | SaCas9KKH | − | CTTCTCAGACTTAAAAGAAAAA | GTCAAT |
| 1699 | E18SaCas9KKH14 | exon18 | SaCas9KKH | − | GCAACTTCTCAGACTTAAAAGA | AAAAGT |
| 1700 | E18SaCas9KKH15 | exon18 | SaCas9KKH | − | CTGTGTTGCAGAGTCCTGAATT | TGCAAT |
| 1701 | E18SaCas9KKH16 | exon18 | SaCas9KKH | − | TCAGAAGCTGTGTTGCAGAGTC | CTGAAT |
| 1702 | E18SaCas9KKH17 | exon18 | SaCas9KKH | − | TACTCGCTCAGAAGCTGTGTTG | CAGAGT |
| 1703 | E18SaCas9KKH18 | exon18 | SaCas9KKH | − | TTGATATAACTGAACTTCACAG | CTGGAT |
| 1704 | E18SaCas9KKH19 | exon18 | SaCas9KKH | − | TTTTTGCTGTCTTAGGTTGGAT | GTTGAT |
| 1705 | E19SaCas9KKH2 | exon19 | SaCas9KKH | + | CATCTGTTCCACCAGGGCCTGA | GCTGAT |
| 1706 | E19SaCas9KKH3 | exon19 | SaCas9KKH | + | CTGAGCTGATCTGCTGGCATCT | TGCAGT |
| 1707 | E19SaCas9KKH11 | exon19 | SaCas9KKH | − | CCTGGTGGAACAGATGGTGAAT | GGTAAT |
| 1708 | E19SaCas9KKH12 | exon19 | SaCas9KKH | − | GGCCCTGGTGGAACAGATGGTG | AATGGT |
| 1709 | E19SaCas9KKH13 | exon19 | SaCas9KKH | − | TCAGGCCCTGGTGGAACAGATG | GTGAAT |
| 1710 | E19SaCas9KKH14 | exon19 | SaCas9KKH | − | CAGCTCAGGCCCTGGTGGAACA | GATGGT |
| 1711 | E19SaCas9KKH15 | exon19 | SaCas9KKH | − | GATCAGCTCAGGCCCTGGTGGA | ACAGAT |
| 1712 | E19SaCas9KKH16 | exon19 | SaCas9KKH | − | ATGCCAGCAGATCAGCTCAGGC | CCTGGT |
| 1713 | E19SaCas9KKH17 | exon19 | SaCas9KKH | − | TTCAGAAAACTGCAAGATGCCA | GCAGAT |
| 1714 | E19SaCas9KKH18 | exon19 | SaCas9KKH | − | AGCTGAGAAGTTCAGAAAACTG | CAAGAT |
| 1715 | E19SaCas9KKH19 | exon19 | SaCas9KKH | − | GCCATAGAGCGAGAAAAAGCTG | AGAAGT |
| 1716 | E20SaCas9KKH1 | exon20 | SaCas9KKH | + | AAGGAGAAGAGATTCTTACCTT | ACAAAT |
| 1717 | E20SaCas9KKH2 | exon20 | SaCas9KKH | + | CCTTACAAATTTTTAACTGACT | TTTAAT |
| 1718 | E20SaCas9KKH3 | exon20 | SaCas9KKH | + | CTGACTTTTAATTGCTGTTGGC | TCTGAT |
| 1719 | E20SaCas9KKH4 | exon20 | SaCas9KKH | + | TTTTAATTGCTGTTGGCTCTGA | TGGGGT |
| 1720 | E20SaCas9KKH5 | exon20 | SaCas9KKH | + | TAATTGCTGTTGGCTCTGATGG | GGTGGT |
| 1721 | E20SaCas9KKH6 | exon20 | SaCas9KKH | + | TGCTGTTGGCTCTGATGGGGTG | GTGGGT |
| 1722 | E20SaCas9KKH7 | exon20 | SaCas9KKH | + | TTGGCTCTGATGGGGTGGTGGG | TTGGAT |
| 1723 | E20SaCas9KKH8 | exon20 | SaCas9KKH | + | GGGGTGGTGGGTTGGATTTTCA | ACCAGT |
| 1724 | E20SaCas9KKH9 | exon20 | SaCas9KKH | + | GTTGGATTTTCAACCAGTTTTC | AGCAGT |
| 1725 | E20SaCas9KKH10 | exon20 | SaCas9KKH | + | GGATTTTCAACCAGTTTTCAGC | AGTAGT |
| 1726 | E20SaCas9KKH11 | exon20 | SaCas9KKH | + | TTCAGCAGTAGTTGTCATCTGC | TCCAAT |
| 1727 | E20SaCas9KKH12 | exon20 | SaCas9KKH | + | GTCATCTGCTCCAATTGTTGTA | GCTGAT |
| 1728 | E20SaCas9KKH13 | exon20 | SaCas9KKH | + | ATTGTTGTAGCTGATTATAGAA | AGCGAT |
| 1729 | E20SaCas9KKH14 | exon20 | SaCas9KKH | + | GTTGTAGCTGATTATAGAAAGC | GATGAT |
| 1730 | E20SaCas9KKH15 | exon20 | SaCas9KKH | + | TTATAGAAAGCGATGATGTTGT | TCTGAT |
| 1731 | E20SaCas9KKH16 | exon20 | SaCas9KKH | + | ATGATGTTGTTCTGATACTCCA | GCCAGT |
| 1732 | E20SaCas9KKH17 | exon20 | SaCas9KKH | + | GTTGTTCTGATACTCCAGCCAG | TTAAGT |
| 1733 | E20SaCas9KKH18 | exon20 | SaCas9KKH | + | AAGTCTCTCACTTAGCAACTGG | CAGAAT |
| 1734 | E20SaCas9KKH19 | exon20 | SaCas9KKH | + | TCTCACTTAGCAACTGGCAGAA | TTCGAT |
| 1735 | E20SaCas9KKH20 | exon20 | SaCas9KKH | + | GCAGAATTCGATCCACCGGCTG | TTCAGT |
| 1736 | E20SaCas9KKH21 | exon20 | SaCas9KKH | + | TGTTCAGTTGTTCTGAGGCTTG | TTTGAT |
| 1737 | E20SaCas9KKH25 | exon20 | SaCas9KKH | − | GTCAGTTAAAAATTTGTAAGGT | AAGAAT |
| 1738 | E20SaCas9KKH26 | exon20 | SaCas9KKH | − | TTAAAAGTCAGTTAAAAATTTG | TAAGGT |
| 1739 | E20SaCas9KKH27 | exon20 | SaCas9KKH | − | CAACAGCAATTAAAAGTCAGTT | AAAAAT |
| 1740 | E20SaCas9KKH28 | exon20 | SaCas9KKH | − | TCAGAGCCAACAGCAATTAAAA | GTCAGT |
| 1741 | E20SaCas9KKH29 | exon20 | SaCas9KKH | − | CCCATCAGAGCCAACAGCAATT | AAAAGT |
| 1742 | E20SaCas9KKH30 | exon20 | SaCas9KKH | − | CCACCACCCCATCAGAGCCAAC | AGCAAT |
| 1743 | E20SaCas9KKH31 | exon20 | SaCas9KKH | − | CAACTACTGCTGAAAACTGGTT | GAAAAT |
| 1744 | E20SaCas9KKH32 | exon20 | SaCas9KKH | − | CAGATGACAACTACTGCTGAAA | ACTGGT |
| 1745 | E20SaCas9KKH33 | exon20 | SaCas9KKH | − | ATAATCAGCTACAACAATTGGA | GCAGAT |
| 1746 | E20SaCas9KKH34 | exon20 | SaCas9KKH | − | ATCGCTTTCTATAATCAGCTAC | AACAAT |
| 1747 | E20SaCas9KKH35 | exon20 | SaCas9KKH | − | TCAGAACAACATCATCGCTTTC | TATAAT |
| 1748 | E20SaCas9KKH36 | exon20 | SaCas9KKH | − | CTAAGTGAGAGACTTAACTGGC | TGGAGT |
| 1749 | E20SaCas9KKH37 | exon20 | SaCas9KKH | − | GTGGATCGAATTCTGCCAGTTG | CTAAGT |
| 1750 | E20SaCas9KKH38 | exon20 | SaCas9KKH | − | AACAGCCGGTGGATCGAATTCT | GCCAGT |
| 1751 | E20SaCas9KKH39 | exon20 | SaCas9KKH | − | GAACAACTGAACAGCCGGTGGA | TCGAAT |
| 1752 | E20SaCas9KKH40 | exon20 | SaCas9KKH | − | CCTCAGAACAACTGAACAGCCG | GTGGAT |
| 1753 | E20SaCas9KKH41 | exon20 | SaCas9KKH | − | CAAGCCTCAGAACAACTGAACA | GCCGGT |
| 1754 | E20SaCas9KKH42 | exon20 | SaCas9KKH | − | TTTCTTTCTAGAGGGTGTTAAT | GCAGAT |
| 1755 | E20SaCas9KKH43 | exon20 | SaCas9KKH | − | TATTTTTTTCTTTCTAGAGGGT | GTTAAT |
| 1756 | E21SaCas9KKH1 | exon21 | SaCas9KKH | + | TGCACATCAGAAAAGACTTGCT | TAAAAT |
| 1757 | E21SaCas9KKH2 | exon21 | SaCas9KKH | + | ACATCAGAAAAGACTTGCTTAA | AATGAT |
| 1758 | E21SaCas9KKH3 | exon21 | SaCas9KKH | + | TTAAAATGATTTGTAAAGGCCA | CAAAGT |
| 1759 | E21SaCas9KKH4 | exon21 | SaCas9KKH | + | CACAAAGTCTGCATCCAGGAAC | ATGGGT |
| 1760 | E21SaCas9KKH5 | exon21 | SaCas9KKH | + | CTTTCTCTTTCAGGGCTATGCT | TTGAAT |
| 1761 | E21SaCas9KKH6 | exon21 | SaCas9KKH | + | TTTCAGGGCTATGCTTTGAATT | TTTAAT |
| 1762 | E21SaCas9KKH7 | exon21 | SaCas9KKH | + | CTATGCTTTGAATTTTTAATCG | TTCAAT |
| 1763 | E21SaCas9KKH8 | exon21 | SaCas9KKH | + | TTGAATTTTTAATCGTTCAATT | TGAGGT |
| 1764 | E21SaCas9KKH9 | exon21 | SaCas9KKH | + | TTTAATCGTTCAATTTGAGGTT | GAAGAT |
| 1765 | E21SaCas9KKH10 | exon21 | SaCas9KKH | + | TCGTTCAATTTGAGGTTGAAGA | TCTGAT |
| 1766 | E21SaCas9KKH11 | exon21 | SaCas9KKH | + | ATTTGAGGTTGAAGATCTGATA | GCCGGT |
| 1767 | E21SaCas9KKH16 | exon21 | SaCas9KKH | − | AGAGAGAAAGAGCTACAGACAA | GTAAGT |
| 1768 | E21SaCas9KKH17 | exon21 | SaCas9KKH | − | GGCCAGAGAGAAAGAGCTACAG | ACAAGT |
| 1769 | E21SaCas9KKH18 | exon21 | SaCas9KKH | − | AAATCATTTTAAGCAAGTCTTT | TCTGAT |
| 1770 | E21SaCas9KKH19 | exon21 | SaCas9KKH | − | TGGCCTTTACAAATCATTTTAA | GCAAGT |
| 1771 | E21SaCas9KKH20 | exon21 | SaCas9KKH | − | GGATGCAGACTTTGTGGCCTTT | ACAAAT |
| 1772 | E21SaCas9KKH21 | exon21 | SaCas9KKH | − | GAAAGGACAAGGACCCATGTTC | CTGGAT |
| 1773 | E21SaCas9KKH22 | exon21 | SaCas9KKH | − | TTCAACCTCAAATTGAACGATT | AAAAAT |
| 1774 | E21SaCas9KKH23 | exon21 | SaCas9KKH | − | TCAGATCTTCAACCTCAAATTG | AACGAT |
| 1775 | E21SaCas9KKH24 | exon21 | SaCas9KKH | − | ACCGGCTATCAGATCTTCAACC | TCAAAT |
| 1776 | E21SaCas9KKH25 | exon21 | SaCas9KKH | − | ACAGGATGAAGTCAACCGGCTA | TCAGAT |
| 1777 | E22SaCas9KKH2 | exon22 | SaCas9KKH | + | ATATTCACAGACCTGCAATTCC | CCGAGT |
| 1778 | E22SaCas9KKH3 | exon22 | SaCas9KKH | + | GCAATTCCCCGAGTCTCTGCTC | CATGAT |
| 1779 | E22SaCas9KKH4 | exon22 | SaCas9KKH | + | CCGAGTCTCTGCTCCATGATTT | CATAGT |
| 1780 | E22SaCas9KKH5 | exon22 | SaCas9KKH | + | GTCTCTGCTCCATGATTTCATA | GTCGGT |
| 1781 | E22SaCas9KKH6 | exon22 | SaCas9KKH | 1 | CATGATTTCATAGTCGGTGACA | CTAAGT |
| 1782 | E22SaCas9KKH7 | exon22 | SaCas9KKH | + | TTCATAGTCGGTGACACTAAGT | TGAGGT |
| 1783 | E22SaCas9KKH8 | exon22 | SaCas9KKH | 1 | GGTGACACTAAGTTGAGGTATG | GAGAGT |
| 1784 | E22SaCas9KKH9 | exon22 | SaCas9KKH | + | CACTAAGTTGAGGTATGGAGAG | TTTGGT |
| 1785 | E22SaCas9KKH10 | exon22 | SaCas9KKH | + | TTTCTGACTGCTGGACCCATGT | CCTGAT |
| 1786 | E22SaCas9KKH11 | exon22 | SaCas9KKH | + | GGACCCATGTCCTGATGGCACT | CATGGT |
| 1787 | E22SaCas9KKH12 | exon22 | SaCas9KKH | + | GTCCTGATGGCACTCATGGTCT | CCTGAT |
| 1788 | E22SaCas9KKH13 | exon22 | SaCas9KKH | + | ACTCATGGTCTCCTGATAGCGC | ATTGGT |
| 1789 | E22SaCas9KKH14 | exon22 | SaCas9KKH | + | TCTCCTGATAGCGCATTGGTGG | CAAAGT |
| 1790 | E22SaCas9KKH20 | exon22 | SaCas9KKH | − | TGGAGCAGAGACTCGGGGAATT | GCAGGT |
| 1791 | E22SaCas9KKH21 | exon22 | SaCas9KKH | − | GAAATCATGGAGCAGAGACTCG | GGGAAT |
| 1792 | E22SaCas9KKH22 | exon22 | SaCas9KKH | − | CTCAACTTAGTGTCACCGACTA | TGAAAT |
| 1793 | E22SaCas9KKH23 | exon22 | SaCas9KKH | − | AACCAAACTCTCCATACCTCAA | CTTAGT |
| 1794 | E22SaCas9KKH24 | exon22 | SaCas9KKH | − | AGTGCCATCAGGACATGGGTCC | AGCAGT |
| 1795 | E22SaCas9KKH25 | exon22 | SaCas9KKH | − | AGACCATGAGTGCCATCAGGAC | ATGGGT |
| 1796 | E22SaCas9KKH26 | exon22 | SaCas9KKH | − | ACCAATGCGCTATCAGGAGACC | ATGAGT |
| 1797 | E22SaCas9KKH27 | exon22 | SaCas9KKH | − | ATAAAGTTTTTGACACTTTGCC | ACCAAT |
| 1798 | E23SaCas9KKH3 | exon23 | SaCas9KKH | + | ATCTTGAATTACCTGAATTTTT | CGGAGT |
| 1799 | E23SaCas9KKH4 | exon23 | SaCas9KKH | + | TTCATTTGCTCCTCTAGCTTTT | GACAAT |
| 1800 | E23SaCas9KKH5 | exon23 | SaCas9KKH | + | AGGAGAGCTTCTTCCAGCGTCC | CTCAAT |
| 1801 | E23SaCas9KKH6 | exon23 | SaCas9KKH | + | CTTCCAGCGTCCCTCAATTTCT | TCAAAT |
| 1802 | E23SaCas9KKH7 | exon23 | SaCas9KKH | + | GCGTCCCTCAATTTCTTCAAAT | TCTGAT |
| 1803 | E23SaCas9KKH8 | exon23 | SaCas9KKH | + | CCCTCAATTTCTTCAAATTCTG | ATTGAT |
| 1804 | E23SaCas9KKH9 | exon23 | SaCas9KKH | + | CAAATTCTGATTGATATTTCCG | GCTAAT |
| 1805 | E23SaCas9KKH10 | exon23 | SaCas9KKH | + | GCGCTTTCTTCGACATCTCTTT | CACAGT |
| 1806 | E23SaCas9KKH11 | exon23 | SaCas9KKH | + | CTTTCTTCGACATCTCTTTCAC | AGTGGT |
| 1807 | E23SaCas9KKH12 | exon23 | SaCas9KKH | + | GACATCTCTTTCACAGTGGTGC | TGAGAT |
| 1808 | E23SaCas9KKH13 | exon23 | SaCas9KKH | + | ATCTCTTTCACAGTGGTGCTGA | GATAGT |
| 1809 | E23SaCas9KKH17 | exon23 | SaCas9KKH | − | TGAATAAACTCCGAAAAATTCA | GGTAAT |
| 1810 | E23SaCas9KKH18 | exon23 | SaCas9KKH | − | AAATGAATAAACTCCGAAAAAT | TCAGGT |
| 1811 | E23SaCas9KKH19 | exon23 | SaCas9KKH | − | AGGAGCAAATGAATAAACTCCG | AAAAAT |
| 1812 | E23SaCas9KKH20 | exon23 | SaCas9KKH | − | TTGTCAAAAGCTAGAGGAGCAA | ATGAAT |
| 1813 | E23SaCas9KKH21 | exon23 | SaCas9KKH | − | AGCATTGTCAAAAGCTAGAGGA | GCAAAT |
| 1814 | E23SaCas9KKH22 | exon23 | SaCas9KKH | − | GCTGGAAGAAGCTCTCCTCCCA | GCTGGT |
| 1815 | E23SaCas9KKH23 | exon23 | SaCas9KKH | − | GGAAATATCAATCAGAATTTGA | AGAAAT |
| 1816 | E23SaCas9KKH24 | exon23 | SaCas9KKH | − | GAAATTAGCCGGAAATATCAAT | CAGAAT |
| 1817 | E23SaCas9KKH25 | exon23 | SaCas9KKH | − | CCCTCTGAAATTAGCCGGAAAT | ATCAAT |
| 1818 | E23SaCas9KKH26 | exon23 | SaCas9KKH | − | AAAGCGCCCTCTGAAATTAGCC | GGAAAT |
| 1819 | E23SaCas9KKH27 | exon23 | SaCas9KKH | − | AGATGTCGAAGAAAGCGCCCTC | TGAAAT |
| 1820 | E23SaCas9KKH28 | exon23 | SaCas9KKH | − | ACTATCTCAGCACCACTGTGAA | AGAGAT |
| 1821 | E23SaCas9KKH29 | exon23 | SaCas9KKH | − | ACAAAGTTCTCTGCAAGAGCAA | CAAAGT |
| 1822 | E23SaCas9KKH30 | exon23 | SaCas9KKH | − | AAAAATTGTTTTTTAGGCTTTA | CAAAGT |
| 1823 | E24SaCas9KKH1 | exon24 | SaCas9KKH | + | TGCACTGTTTCAGCTGCTTTTT | TAGAAT |
| 1824 | E24SaCas9KKH2 | exon24 | SaCas9KKH | + | TTCAGCTGCTTTTTTAGAATTT | CTGAAT |
| 1825 | E24SaCas9KKH3 | exon24 | SaCas9KKH | + | CAACTTCAGCCATCCATTTCTT | CAGGGT |
| 1826 | E24SaCas9KKH4 | exon24 | SaCas9KKH | + | ATCCATTTCTTCAGGGTTTGTA | TGTGAT |
| 1827 | E24SaCas9KKH7 | exon24 | SaCas9KKH | − | AAGCAGCTGAAACAGTGCAGAG | TAAGAT |
| 1828 | E24SaCas9KKH8 | exon24 | SaCas9KKH | − | TAAAAAAGCAGCTGAAACAGTG | CAGAGT |
| 1829 | E24SaCas9KKH9 | exon24 | SaCas9KKH | − | GAAATTCTAAAAAAGCAGCTGA | AACAGT |
| 1830 | E24SaCas9KKH10 | exon24 | SaCas9KKH | − | AATGGCCTGCCCTTGGGGATTC | AGAAAT |
| 1831 | E24SaCas9KKH11 | exon24 | SaCas9KKH | − | GAAGGAGGAATGGCCTGCCCTT | GGGGAT |
| 1832 | E24SaCas9KKH12 | exon24 | SaCas9KKH | − | GAAGTTGATGTTTTTCTGAAGG | AGGAAT |
| 1833 | E24SaCas9KKH13 | exon24 | SaCas9KKH | − | CCTGAAGAAATGGATGGCTGAA | GTTGAT |
| 1834 | E24SaCas9KKH14 | exon24 | SaCas9KKH | − | AAACCCTGAAGAAATGGATGGC | TGAAGT |
| 1835 | E24SaCas9KKH15 | exon24 | SaCas9KKH | − | ATCACATACAAACCCTGAAGAA | ATGGAT |
| 1836 | E24SaCas9KKH16 | exon24 | SaCas9KKH | − | CAGAATCACATACAAACCCTGA | AGAAAT |
| 1837 | E25SaCas9KKH1 | exon25 | SaCas9KKH | + | ATTGTCTATACCTGTTGGCACA | TGTGAT |
| 1838 | E25SaCas9KKH2 | exon25 | SaCas9KKH | + | CCTGTTGGCACATGTGATCCCA | CTGAGT |
| 1839 | E25SaCas9KKH3 | exon25 | SaCas9KKH | + | GCACATGTGATCCCACTGAGTG | TTAAGT |
| 1840 | E25SaCas9KKH4 | exon25 | SaCas9KKH | + | ATCCCACTGAGTGTTAAGTTCT | TTGAGT |
| 1841 | E25SaCas9KKH5 | exon25 | SaCas9KKH | + | GTTAAGTTCTTTGAGTTCTGTC | TCAAGT |
| 1842 | E25SaCas9KKH6 | exon25 | SaCas9KKH | + | CATTGACACTGTTTAGACTGGG | CTGAAT |
| 1843 | E25SaCas9KKH7 | exon25 | SaCas9KKH | + | TGTTTAGACTGGGCTGAATTGT | CTGAAT |
| 1844 | E25SaCas9KKH12 | exon25 | SaCas9KKH | − | CTCAGTGGGATCACATGTGCCA | ACAGGT |
| 1845 | E25SaCas9KKH13 | exon25 | SaCas9KKH | − | ACTCAAAGAACTTAACACTCAG | TGGGAT |
| 1846 | E25SaCas9KKH14 | exon25 | SaCas9KKH | − | ACAGAACTCAAAGAACTTAACA | CTCAGT |
| 1847 | E25SaCas9KKH15 | exon25 | SaCas9KKH | − | AAGATAAAGAATGAAGCAGAGC | CAGAGT |
| 1848 | E25SaCas9KKH16 | exon25 | SaCas9KKH | − | CAATGAAGGTGGGCAGAAGATA | AAGAAT |
| 1849 | E25SaCas9KKH17 | exon25 | SaCas9KKH | − | ACAGTGTCAATGAAGGTGGGCA | GAAGAT |
| 1850 | E25SaCas9KKH18 | exon25 | SaCas9KKH | − | GCCCAGTCTAAACAGTGTCAAT | GAAGGT |
| 1851 | E25SaCas9KKH19 | exon25 | SaCas9KKH | − | AATTCAGCCCAGTCTAAACAGT | GTCAAT |
| 1852 | E25SaCas9KKH20 | exon25 | SaCas9KKH | − | TCAGACAATTCAGCCCAGTCTA | AACAGT |
| 1853 | E25SaCas9KKH21 | exon25 | SaCas9KKH | − | CAGTGATATTCAGACAATTCAG | CCCAGT |
| 1854 | E25SaCas9KKH22 | exon25 | SaCas9KKH | − | AGCTTTTAGTCAGTGATATTCA | GACAAT |
| 1855 | E25SaCas9KKH23 | exon25 | SaCas9KKH | − | TTTATTTTCTTAGCTTTTAGTC | AGTGAT |
| 1856 | E25SaCas9KKH24 | exon25 | SaCas9KKH | − | TGATTTATTTTCTTAGCTTTTA | GTCAGT |
| 1857 | E26SaCas9KKH1 | exon26 | SaCas9KKH | + | CTTCATCTCTTCAACTGCTTTC | TGTAAT |
| 1858 | E26SaCas9KKH2 | exon26 | SaCas9KKH | + | CAACTGCTTTCTGTAATTCATC | TGGAGT |
| 1859 | E26SaCas9KKH3 | exon26 | SaCas9KKH | + | AATTCATCTGGAGTTTTATATT | CAAAAT |
| 1860 | E26SaCas9KKH4 | exon26 | SaCas9KKH | + | GTTTTATATTCAAAATCTCTCT | CAAGAT |
| 1861 | E26SaCas9KKH5 | exon26 | SaCas9KKH | + | TTGTGTCATCCATTCGTGCATC | TCTGAT |
| 1862 | E26SaCas9KKH6 | exon26 | SaCas9KKH | + | GTCATCCATTCGTGCATCTCTG | ATAGAT |
| 1863 | E26SaCas9KKH7 | exon26 | SaCas9KKH | + | CTGATAGATCTTTCTGGAGGCT | TACAGT |
| 1864 | E26SaCas9KKH10 | exon26 | SaCas9KKH | − | TACAGAAAGCAGTTGAAGAGAT | GAAGGT |
| 1865 | E26SaCas9KKH11 | exon26 | SaCas9KKH | − | ATGAATTACAGAAAGCAGTTGA | AGAGAT |
| 1866 | E26SaCas9KKH12 | exon26 | SaCas9KKH | − | AAACTCCAGATGAATTACAGAA | AGCAGT |
| 1867 | E26SaCas9KKH13 | exon26 | SaCas9KKH | − | GATTTTGAATATAAAACTCCAG | ATGAAT |
| 1868 | E26SaCas9KKH14 | exon26 | SaCas9KKH | − | GAGAGATTTTGAATATAAAACT | CCAGAT |
| 1869 | E26SaCas9KKH15 | exon26 | SaCas9KKH | − | GAAGAGTATCTTGAGAGAGATT | TTGAAT |
| 1870 | E26SaCas9KKH16 | exon26 | SaCas9KKH | − | AGCTGAAGAAGAGTATCTTGAG | AGAGAT |
| 1871 | E26SaCas9KKH17 | exon26 | SaCas9KKH | − | GAATGGATGACACAAGCTGAAG | AAGAGT |
| 1872 | E26SaCas9KKH18 | exon26 | SaCas9KKH | − | AAGATCTATCAGAGATGCACGA | ATGGAT |
| 1873 | E26SaCas9KKH19 | exon26 | SaCas9KKH | − | CAGAAAGATCTATCAGAGATGC | ACGAAT |
| 1874 | E26SaCas9KKH20 | exon26 | SaCas9KKH | − | TAAGCCTCCAGAAAGATCTATC | AGAGAT |
| 1875 | E26SaCas9KKH21 | exon26 | SaCas9KKH | − | GGAGAAAACTGTAAGCCTCCAG | AAAGAT |
| 1876 | E26SaCas9KKH22 | exon26 | SaCas9KKH | − | TGCCAGAAAGGAGGCCTTGAAG | GGAGGT |
| 1877 | E27SaCas9KKH1 | exon27 | SaCas9KKH | + | ACCAAGAAAAGCAACTGACTTC | CAAAGT |
| 1878 | E27SaCas9KKH2 | exon27 | SaCas9KKH | + | AAGTCTTGCATTTCCCATTCAG | CCTAGT |
| 1879 | E27SaCas9KKH3 | exon27 | SaCas9KKH | + | CCATTCAGCCTAGTGCAGAGCC | ACTGGT |
| 1880 | E27SaCas9KKH4 | exon27 | SaCas9KKH | + | TTCAGCCTAGTGCAGAGCCACT | GGTAGT |
| 1881 | E27SaCas9KKH5 | exon27 | SaCas9KKH | + | GCCTAGTGCAGAGCCACTGGTA | GTTGGT |
| 1882 | E27SaCas9KKH6 | exon27 | SaCas9KKH | + | TAGTGCAGAGCCACTGGTAGTT | GGTGGT |
| 1883 | E27SaCas9KKH7 | exon27 | SaCas9KKH | + | AGAGCCACTGGTAGTTGGTGGT | TAGAGT |
| 1884 | E27SaCas9KKH8 | exon27 | SaCas9KKH | + | CTGGTAGTTGGTGGTTAGAGTT | TCAAGT |
| 1885 | E27SaCas9KKH9 | exon27 | SaCas9KKH | + | CTTTTTTAAGGCCTCTTGTGCT | ACAGGT |
| 1886 | E27SaCas9KKH10 | exon27 | SaCas9KKH | + | GAGCTATGACACTATTTACAGA | CTCAGT |
| 1887 | E27SaCas9KKH11 | exon27 | SaCas9KKH | + | GACACTATTTACAGACTCAGTA | AGGAGT |
| 1888 | E27SaCas9KKH18 | exon27 | SaCas9KKH | − | TGGGAAATGCAAGACTTTGGAA | GTCAGT |
| 1889 | E27SaCas9KKH19 | exon27 | SaCas9KKH | − | TGAATGGGAAATGCAAGACTTT | GGAAGT |
| 1890 | E27SaCas9KKH20 | exon27 | SaCas9KKH | − | TGGCTCTGCACTAGGCTGAATG | GGAAAT |
| 1891 | E27SaCas9KKH21 | exon27 | SaCas9KKH | − | CTACCAGTGGCTCTGCACTAGG | CTGAAT |
| 1892 | E27SaCas9KKH22 | exon27 | SaCas9KKH | − | CTTGAAACTCTAACCACCAACT | ACCAGT |
| 1893 | E27SaCas9KKH23 | exon27 | SaCas9KKH | − | GAAACTCCTTACTGAGTCTGTA | AATAGT |
| 1894 | E27SaCas9KKH24 | exon27 | SaCas9KKH | − | AGTGAAACTCCTTACTGAGTCT | GTAAAT |
| 1895 | E27SaCas9KKH25 | exon27 | SaCas9KKH | − | GAAGCGAAAGTGAAACTCCTTA | CTGAGT |
| 1896 | E27SaCas9KKH26 | exon27 | SaCas9KKH | + | AAGAGGCCCAACAAAAAGAAGC | GAAAGT |
| 1897 | E28SaCas9KKH1 | exon28 | SaCas9KKH | + | TACAACTTACATCTAGCACCTC | AGAGAT |
| 1898 | E28SaCas9KKH2 | exon28 | SaCas9KKH | + | CAGAGATTTCCTCAGCTCCGCC | AGGAAT |
| 1899 | E28SaCas9KKH3 | exon28 | SaCas9KKH | + | CCTCAGCTCCGCCAGGAATGTT | TTCAGT |
| 1900 | E28SaCas9KKH4 | exon28 | SaCas9KKH | + | CAGCTCCGCCAGGAATGTTTTC | AGTGGT |
| 1901 | E28SaCas9KKH5 | exon28 | SaCas9KKH | + | GCCAGGAATGTTTTCAGTGGTT | TTAAGT |
| 1902 | E28SaCas9KKH6 | exon28 | SaCas9KKH | + | AATGTTTTCAGTGGTTTTAAGT | TTAAAT |
| 1903 | E28SaCas9KKH7 | exon28 | SaCas9KKH | + | TTTAGCCACTTGTTTGCTTTCT | CCAAGT |
| 1904 | E28SaCas9KKH8 | exon28 | SaCas9KKH | + | CTTGTTTGCTTTCTCCAAGTAT | GACAAT |
| 1905 | E28SaCas9KKH17 | exon28 | SaCas9KKH | − | GGAAATCTCTGAGGTGCTAGAT | GTAAGT |
| 1906 | E28SaCas9KKH18 | exon28 | SaCas9KKH | − | AGCTGAGGAAATCTCTGAGGTG | CTAGAT |
| 1907 | E28SaCas9KKH19 | exon28 | SaCas9KKH | − | CTGGCGGAGCTGAGGAAATCTC | TGAGGT |
| 1908 | E28SaCas9KKH20 | exon28 | SaCas9KKH | − | AAAACATTCCTGGCGGAGCTGA | GGAAAT |
| 1909 | E28SaCas9KKH21 | exon28 | SaCas9KKH | − | GCAAACAAGTGGCTAAATGAAG | TAGAAT |
| 1910 | E28SaCas9KKH22 | exon28 | SaCas9KKH | − | AGAAAGCAAACAAGTGGCTAAA | TGAAGT |
| 1911 | E28SaCas9KKH23 | exon28 | SaCas9KKH | − | CTTGGAGAAAGCAAACAAGTGG | CTAAAT |
| 1912 | E28SaCas9KKH24 | exon28 | SaCas9KKH | − | TTGTCATACTTGGAGAAAGCAA | ACAAGT |
| 1913 | E28SaCas9KKH25 | exon28 | SaCas9KKH | − | TAGGAAGTTTGGGCATGTTGGC | ATGAGT |
| 1914 | E29SaCas9KKH1 | exon29 | SaCas9KKH | + | CACTTATCTTCATACCTCTTCA | TGTAGT |
| 1915 | E29SaCas9KKH2 | exon29 | SaCas9KKH | + | TCTTCATGTAGTTCCCTCCAAC | GAGAAT |
| 1916 | E29SaCas9KKH3 | exon29 | SaCas9KKH | + | ATGTAGTTCCCTCCAACGAGAA | TTAAAT |
| 1917 | E29SaCas9KKH4 | exon29 | SaCas9KKH | + | CCTCCAACGAGAATTAAATGTC | TCAAGT |
| 1918 | E29SaCas9KKH5 | exon29 | SaCas9KKH | + | AATTAAATGTCTCAAGTTCCTC | ATTGAT |
| 1919 | E29SaCas9KKH6 | exon29 | SaCas9KKH | + | CATCCATGACTCCGCCATCTGT | TAGGGT |
| 1920 | E29SaCas9KKH7 | exon29 | SaCas9KKH | + | TCCGCCATCTGTTAGGGTCTGT | GCCAAT |
| 1921 | E29SaCas9KKH8 | exon29 | SaCas9KKH | + | CTGTTAGGGTCTGTGCCAATAT | GCGAAT |
| 1922 | E29SaCas9KKH9 | exon29 | SaCas9KKH | + | AGGGTCTGTGCCAATATGCGAA | TCTGAT |
| 1923 | E29SaCas9KKH10 | exon29 | SaCas9KKH | + | TGTGCCAATATGCGAATCTGAT | TTGGGT |
| 1924 | E29SaCas9KKH11 | exon29 | SaCas9KKH | + | CGAATCTGATTTGGGTTATCCT | CTGAAT |
| 1925 | E29SaCas9KKH12 | exon29 | SaCas9KKH | + | GGGTTATCCTCTGAATGTCGCA | TCAAAT |
| 1926 | E29SaCas9KKH13 | exon29 | SaCas9KKH | + | CTCTGAATGTCGCATCAAATTT | TCAAGT |
| 1927 | E29SaCas9KKH20 | exon29 | SaCas9KKH | − | CTCGTTGGAGGGAACTACATGA | AGAGGT |
| 1928 | E29SaCas9KKH21 | exon29 | SaCas9KKH | − | AATCAATGAGGAACTTGAGACA | TTTAAT |
| 1929 | E29SaCas9KKH22 | exon29 | SaCas9KKH | − | TGGCGGAGTCATGGATGAGCTA | ATCAAT |
| 1930 | E29SaCas9KKH23 | exon29 | SaCas9KKH | − | CAGATGGCGGAGTCATGGATGA | GCTAAT |
| 1931 | E29SaCas9KKH24 | exon29 | SaCas9KKH | − | GACCCTAACAGATGGCGGAGTC | ATGGAT |
| 1932 | E29SaCas9KKH25 | exon29 | SaCas9KKH | − | TGGCACAGACCCTAACAGATGG | CGGAGT |
| 1933 | E29SaCas9KKH26 | exon29 | SaCas9KKH | − | TCGCATATTGGCACAGACCCTA | ACAGAT |
| 1934 | E29SaCas9KKH27 | exon29 | SaCas9KKH | − | GACATTCAGAGGATAACCCAAA | TCAGAT |
| 1935 | E29SaCas9KKH28 | exon29 | SaCas9KKH | − | GATGCGACATTCAGAGGATAAC | CCAAAT |
| 1936 | E29SaCas9KKH29 | exon29 | SaCas9KKH | − | TGAAAATTTGATGCGACATTCA | GAGGAT |
| 1937 | E29SaCas9KKH30 | exon29 | SaCas9KKH | − | ATGTGTTTCAGTCACTTGAAAA | TTTGAT |
| 1938 | E29SaCas9KKH31 | exon29 | SaCas9KKH | − | TGCAAATGTGTTTCAGTCACTT | GAAAAT |
| 1939 | E30SaCas9KKH1 | exon30 | SaCas9KKH | + | TTTGAGCTGCGTCCACCTTGTC | TGCAAT |
| 1940 | E30SaCas9KKH2 | exon30 | SaCas9KKH | + | CAATATAAGCTGCCAACTGCTT | GTCAAT |
| 1941 | E30SaCas9KKH3 | exon30 | SaCas9KKH | + | ATAAGCTGCCAACTGCTTGTCA | ATGAAT |
| 1942 | E30SaCas9KKH4 | exon30 | SaCas9KKH | + | TGTCAATGAATGTGAGGGACTC | CTGGAT |
| 1943 | E30SaCas9KKH5 | exon30 | SaCas9KKH | + | ATGAATGTGAGGGACTCCTGGA | TTAAGT |
| 1944 | E30SaCas9KKH6 | exon30 | SaCas9KKH | + | GAGGGACTCCTGGATTAAGTGT | AAGGAT |
| 1945 | E30SaCas9KKH7 | exon30 | SaCas9KKH | + | CCTGGATTAAGTGTAAGGATTT | TTCAGT |
| 1946 | E30SaCas9KKH8 | exon30 | SaCas9KKH | + | ATTTTTCAGTCTCCTGGGCAGA | CTGGAT |
| 1947 | E30SaCas9KKH13 | exon30 | SaCas9KKH | − | TCAAATGCCTCAGGAAGCCCAG | GCAAGT |
| 1948 | E30SaCas9KKH14 | exon30 | SaCas9KKH | − | TTGCAGACAAGGTGGACGCAGC | TCAAAT |
| 1949 | E30SaCas9KKH15 | exon30 | SaCas9KKH | − | AGTTGGCAGCTTATATTGCAGA | CAAGGT |
| 1950 | E30SaCas9KKH16 | exon30 | SaCas9KKH | − | GAGTCCCTCACATTCATTGACA | AGCAGT |
| 1951 | E30SaCas9KKH17 | exon30 | SaCas9KKH | − | GAAAAATCCTTACACTTAATCC | AGGAGT |
| 1952 | E30SaCas9KKH18 | exon30 | SaCas9KKH | − | AGGAGACTGAAAAATCCTTACA | CTTAAT |
| 1953 | E30SaCas9KKH19 | exon30 | SaCas9KKH | − | ATCCAGTCTGCCCAGGAGACTG | AAAAAT |
| 1954 | E30SaCas9KKH20 | exon30 | SaCas9KKH | − | CAAAAGTTGCTTGAACAGAGCA | TCCAGT |
| 1955 | E30SaCas9KKH21 | exon30 | SaCas9KKH | − | TCTTTTTAGGCTGTAAGGAGGC | AAAAGT |
| 1956 | E31SaCas9KKH1 | exon31 | SaCas9KKH | + | AAATAACATATACCTGTGCAAC | ATCAAT |
| 1957 | E31SaCas9KKH2 | exon31 | SaCas9KKH | + | ACTCTTTGGGCAGCCTCCTTCC | CCTGAT |
| 1958 | E31SaCas9KKH3 | exon31 | SaCas9KKH | + | TATGTTTCTTCATTTCTTCTAA | ACTGAT |
| 1959 | E31SaCas9KKH4 | exon31 | SaCas9KKH | + | TCTAAACTGATCTCATGACTTG | TCAAAT |
| 1960 | E31SaCas9KKH5 | exon31 | SaCas9KKH | + | ACTGATCTCATGACTTGTCAAA | TCAGAT |
| 1961 | E31SaCas9KKH6 | exon31 | SaCas9KKH | + | TCTCATGACTTGTCAAATCAGA | TTGGAT |
| 1962 | E31SaCas9KKH9 | exon31 | SaCas9KKH | − | TCCTGTCTCAGATTGATGTTGC | ACAGGT |
| 1963 | E31SaCas9KKH10 | exon31 | SaCas9KKH | − | TGCCCAAAGAGTCCTGTCTCAG | ATTGAT |
| 1964 | E31SaCas9KKH11 | exon31 | SaCas9KKH | − | AGGCTGCCCAAAGAGTCCTGTC | TCAGAT |
| 1965 | E31SaCas9KKH12 | exon31 | SaCas9KKH | − | ATCAGGGGAAGGAGGCTGCCCA | AAGAGT |
| 1966 | E31SaCas9KKH13 | exon31 | SaCas9KKH | − | CAGTTTAGAAGAAATGAAGAAA | CATAAT |
| 1967 | E31SaCas9KKH14 | exon31 | SaCas9KKH | − | CAAGTCATGAGATCAGTTTAGA | AGAAAT |
| 1968 | E31SaCas9KKH15 | exon31 | SaCas9KKH | − | ATCTGATTTGACAAGTCATGAG | ATCAGT |
| 1969 | E31SaCas9KKH16 | exon31 | SaCas9KKH | − | TCCAATCTGATTTGACAAGTCA | TGAGAT |
| 1970 | E31SaCas9KKH17 | exon31 | SaCas9KKH | − | ACAGAAAATCCAATCTGATTTG | ACAAGT |
| 1971 | E31SaCas9KKH18 | exon31 | SaCas9KKH | − | ATCCTCCCAACAGAAAATCCAA | TCTGAT |
| 1972 | E31SaCas9KKH19 | exon31 | SaCas9KKH | − | ATGCTATCCTCCCAACAGAAAA | TCCAAT |
| 1973 | E32SaCas9KKH2 | exon32 | SaCas9KKH | + | CCACCAGAAATACATACCACAC | AATGAT |
| 1974 | E32SaCas9KKH3 | exon32 | SaCas9KKH | + | TTCCTGTTCCACACTCTTTGTT | TCCAAT |
| 1975 | E32SaCas9KKH4 | exon32 | SaCas9KKH | + | ACACTCTTTGTTTCCAATGCAG | GCAAGT |
| 1976 | E32SaCas9KKH5 | exon32 | SaCas9KKH | + | GCAAGTGCATCTTCACTTCATC | TAAAAT |
| 1977 | E32SaCas9KKH6 | exon32 | SaCas9KKH | + | TTACTTTCTTGTAGACGCTGCT | CAAAAT |
| 1978 | E32SaCas9KKH7 | exon32 | SaCas9KKH | + | TTGTAGACGCTGCTCAAAATTG | GCTGGT |
| 1979 | E32SaCas9KKH8 | exon32 | SaCas9KKH | + | CTGCTCAAAATTGGCTGGTTTC | TGGAAT |
| 1980 | E32SaCas9KKH9 | exon32 | SaCas9KKH | + | CTCAAAATTGGCTGGTTTCTGG | AATAAT |
| 1981 | E32SaCas9KKH10 | exon32 | SaCas9KKH | + | TCGAAACTTCATGGAGACATCT | TGTAAT |
| 1982 | E32SaCas9KKH16 | exon32 | SaCas9KKH | − | TACAGTCACAGCTAAATCATTG | TGTGGT |
| 1983 | E32SaCas9KKH17 | exon32 | SaCas9KKH | − | ACAGGAAGTAGTACAGTCACAG | CTAAAT |
| 1984 | E32SaCas9KKH18 | exon32 | SaCas9KKH | − | AAGAGTGTGGAACAGGAAGTAG | TACAGT |
| 1985 | E32SaCas9KKH19 | exon32 | SaCas9KKH | − | AAACAAAGAGTGTGGAACAGGA | AGTAGT |
| 1986 | E32SaCas9KKH20 | exon32 | SaCas9KKH | − | TGGAAACAAAGAGTGTGGAACA | GGAAGT |
| 1987 | E32SaCas9KKH21 | exon32 | SaCas9KKH | − | GCACTTGCCTGCATTGGAAACA | AAGAGT |
| 1988 | E32SaCas9KKH22 | exon32 | SaCas9KKH | − | GTAAGATGATTTTAGATGAAGT | GAAGAT |
| 1989 | E32SaCas9KKH23 | exon32 | SaCas9KKH | − | AAGAAAGTAAGATGATTTTAGA | TGAAGT |
| 1990 | E32SaCas9KKH24 | exon32 | SaCas9KKH | − | TCTACAAGAAAGTAAGATGATT | TTAGAT |
| 1991 | E32SaCas9KKH25 | exon32 | SaCas9KKH | − | AGCAGCGTCTACAAGAAAGTAA | GATGAT |
| 1992 | E32SaCas9KKH26 | exon32 | SaCas9KKH | − | TTGAGCAGCGTCTACAAGAAAG | TAAGAT |
| 1993 | E32SaCas9KKH27 | exon32 | SaCas9KKH | − | CAATTTTGAGCAGCGTCTACAA | GAAAGT |
| 1994 | E32SaCas9KKH28 | exon32 | SaCas9KKH | − | GTTTCGATTATTCCAGAAACCA | GCCAAT |
| 1995 | E32SaCas9KKH29 | exon32 | SaCas9KKH | − | TTACAAGATGTCTCCATGAAGT | TTCGAT |
| 1996 | E32SaCas9KKH30 | exon32 | SaCas9KKH | − | AAAAAATTACAAGATGTCTCCA | TGAAGT |
| 1997 | E32SaCas9KKH31 | exon32 | SaCas9KKH | − | ACTGTCCTTACAGAAAAAATTA | CAAGAT |
| 1998 | E33SaCas9KKH1 | exon33 | SaCas9KKH | + | CACACCTTTGCTCCCAGCTCAT | TATAAT |
| 1999 | E33SaCas9KKH2 | exon33 | SaCas9KKH | + | CTTTGCTCCCAGCTCATTATAA | TGCAAT |
| 2000 | E33SaCas9KKH3 | exon33 | SaCas9KKH | + | TTTCAAAGCTGTTACTCTTTCA | TCAAGT |
| 2001 | E33SaCas9KKH4 | exon33 | SaCas9KKH | + | GTTACTCTTTCATCAAGTTCTT | TGGGAT |
| 2002 | E33SaCas9KKH5 | exon33 | SaCas9KKH | + | GATTTTCCGTCTGCTTTTTCTG | TACAAT |
| 2003 | E33SaCas9KKH6 | exon33 | SaCas9KKH | + | GCTTTTTCTGTACAATCTGACG | TCCAGT |
| 2004 | E33SaCas9KKH7 | exon33 | SaCas9KKH | + | TTCACTTCACTCAGACTTTTAT | ACAAGT |
| 2005 | E33SaCas9KKH8 | exon33 | SaCas9KKH | + | CACTCAGACTTTTATACAAGTT | CTAAGT |
| 2006 | E33SaCas9KKH11 | exon33 | SaCas9KKH | − | TGCATTATAATGAGCTGGGAGC | AAAGGT |
| 2007 | E33SaCas9KKH12 | exon33 | SaCas9KKH | − | AGTAACAGCTTTGAAATTGCAT | TATAAT |
| 2008 | E33SaCas9KKH13 | exon33 | SaCas9KKH | − | CTTGATGAAAGAGTAACAGCTT | TGAAAT |
| 2009 | E33SaCas9KKH14 | exon33 | SaCas9KKH | − | AAAATCCCAAAGAACTTGATGA | AAGAGT |
| 2010 | E33SaCas9KKH15 | exon33 | SaCas9KKH | − | GCAGACGGAAAATCCCAAAGAA | CTTGAT |
| 2011 | E33SaCas9KKH16 | exon33 | SaCas9KKH | − | GATTGTACAGAAAAAGCAGACG | GAAAAT |
| 2012 | E33SaCas9KKH17 | exon33 | SaCas9KKH | − | AAATGGTGATAAAGACTGGACG | TCAGAT |
| 2013 | E33SaCas9KKH18 | exon33 | SaCas9KKH | − | AAGTGAAGTCTGAAGTGGAAAT | GGTGAT |
| 2014 | E33SaCas9KKH19 | exon33 | SaCas9KKH | − | GTGAAGTGAAGTCTGAAGTGGA | AATGGT |
| 2015 | E33SaCas9KKH20 | exon33 | SaCas9KKH | − | TGAGTGAAGTGAAGTCTGAAGT | GGAAAT |
| 2016 | E33SaCas9KKH21 | exon33 | SaCas9KKH | − | AAAGTCTGAGTGAAGTGAAGTC | TGAAGT |
| 2017 | E33SaCas9KKH22 | exon33 | SaCas9KKH | − | TTGTATAAAAGTCTGAGTGAAG | TGAAGT |
| 2018 | E33SaCas9KKH23 | exon33 | SaCas9KKH | − | AGAACTTGTATAAAAGTCTGAG | TGAAGT |
| 2019 | E33SaCas9KKH24 | exon33 | SaCas9KKH | − | AACTTAGAACTTGTATAAAAGT | CTGAGT |
| 2020 | E33SaCas9KKH25 | exon33 | SaCas9KKH | − | TGTTTAAACTTAGAACTTGTAT | AAAAGT |
| 2021 | E34SaCas9KKH1 | exon34 | SaCas9KKH | + | TTTACCTTTCCCCAGGCAACTT | CAGAAT |
| 2022 | E34SaCas9KKH2 | exon34 | SaCas9KKH | + | TTTCCCCAGGCAACTTCAGAAT | CCAAAT |
| 2023 | E34SaCas9KKH3 | exon34 | SaCas9KKH | + | ATTACTAGGCATTCCTTCAACT | GCTGAT |
| 2024 | E34SaCas9KKH4 | exon34 | SaCas9KKH | + | TCCTTCAACTGCTGATCTCTTT | GTCAAT |
| 2025 | E34SaCas9KKH5 | exon34 | SaCas9KKH | + | CATTTCCTTTCGCATCTTACGG | GACAAT |
| 2026 | E34SaCas9KKH12 | exon34 | SaCas9KKH | − | TGGATTCTGAAGTTGCCTGGGG | AAAGGT |
| 2027 | E34SaCas9KKH13 | exon34 | SaCas9KKH | − | GAATGCCTAGTAATTTGGATTC | TGAAGT |
| 2028 | E34SaCas9KKH14 | exon34 | SaCas9KKH | − | AGTTGAAGGAATGCCTAGTAAT | TTGGAT |
| 2029 | E34SaCas9KKH15 | exon34 | SaCas9KKH | − | ATCAGCAGTTGAAGGAATGCCT | AGTAAT |
| 2030 | E34SaCas9KKH16 | exon34 | SaCas9KKH | − | GAGATCAGCAGTTGAAGGAATG | CCTAGT |
| 2031 | E34SaCas9KKH17 | exon34 | SaCas9KKH | − | TGACAAAGAGATCAGCAGTTGA | AGGAAT |
| 2032 | E34SaCas9KKH18 | exon34 | SaCas9KKH | − | ATATGGAATTGACAAAGAGATC | AGCAGT |
| 2033 | E34SaCas9KKH19 | exon34 | SaCas9KKH | − | GCTACAGATATGGAATTGACAA | AGAGAT |
| 2034 | E34SaCas9KKH20 | exon34 | SaCas9KKH | − | GAATGGCTGGCAGCTACAGATA | TGGAAT |
| 2035 | E34SaCas9KKH21 | exon34 | SaCas9KKH | − | CTTGACAGAATGGCTGGCAGCT | ACAGAT |
| 2036 | E34SaCas9KKH22 | exon34 | SaCas9KKH | − | CGAAAGGAAATGAATGTCTTGA | CAGAAT |
| 2037 | E34SaCas9KKH23 | exon34 | SaCas9KKH | − | GTCCCGTAAGATGCGAAAGGAA | ATGAAT |
| 2038 | E34SaCas9KKH24 | exon34 | SaCas9KKH | − | AATTGTCCCGTAAGATGCGAAA | GGAAAT |
| 2039 | E34SaCas9KKH25 | exon34 | SaCas9KKH | − | AGAAATGCTTGAAATTGTCCCG | TAAGAT |
| 2040 | E34SaCas9KKH26 | exon34 | SaCas9KKH | − | AAGCAACAGTTGGAGAAATGCT | TGAAAT |
| 2041 | E34SaCas9KKH27 | exon34 | SaCas9KKH | − | ACAGAAAGAAAGCAACAGTTGG | AGAAAT |
| 2042 | E34SaCas9KKH28 | exon34 | SaCas9KKH | − | TTTCAGGTAACAGAAAGAAAGC | AACAGT |
| 2043 | E35SaCas9KKH1 | exon35 | SaCas9KKH | + | CTAGCCTTTTCTCTTACCAACA | AAAGAT |
| 2044 | E35SaCas9KKH2 | exon35 | SaCas9KKH | + | GATTTAACCACTCTTCTGCTCG | GGAGGT |
| 2045 | E35SaCas9KKH3 | exon35 | SaCas9KKH | + | TCTGCTCGGGAGGTGACAGCTA | TCCAGT |
| 2046 | E35SaCas9KKH4 | exon35 | SaCas9KKH | + | TATCCAGTTACTATTCAGAAGA | CTGAGT |
| 2047 | E35SaCas9KKH5 | exon35 | SaCas9KKH | + | TTTTCAAGGCCTCTCCTACCTC | TGTGAT |
| 2048 | E35SaCas9KKH6 | exon35 | SaCas9KKH | + | TCTCCTACCTCTGTGATACTCT | TCAGGT |
| 2049 | E35SaCas9KKH7 | exon35 | SaCas9KKH | + | TCTTCAGGTGCACCTTCTGTTT | CTCAAT |
| 2050 | E35SaCas9KKH8 | exon35 | SaCas9KKH | + | CCTTCTGTTTCTCAATCTCTTT | TTGAGT |
| 2051 | E35SaCas9KKH10 | exon35 | SaCas9KKH | − | CAGAAGAGTGGTTAAATCTTTT | GTTGGT |
| 2052 | E35SaCas9KKH11 | exon35 | SaCas9KKH | − | CACCTCCCGAGCAGAAGAGTGG | TTAAAT |
| 2053 | E35SaCas9KKH12 | exon35 | SaCas9KKH | − | GCTGTCACCTCCCGAGCAGAAG | AGTGGT |
| 2054 | E35SaCas9KKH13 | exon35 | SaCas9KKH | − | ATAGCTGTCACCTCCCGAGCAG | AAGAGT |
| 2055 | E35SaCas9KKH14 | exon35 | SaCas9KKH | − | AACTCAGTCTTCTGAATAGTAA | CTGGAT |
| 2056 | E35SaCas9KKH15 | exon35 | SaCas9KKH | − | GGAAGATAAACTCAGTCTTCTG | AATAGT |
| 2057 | E35SaCas9KKH16 | exon35 | SaCas9KKH | − | GGTGGAAGATAAACTCAGTCTT | CTGAAT |
| 2058 | E35SaCas9KKH17 | exon35 | SaCas9KKH | − | GGAGACGTTGGTGGAAGATAAA | CTCAGT |
| 2059 | E35SaCas9KKH18 | exon35 | SaCas9KKH | − | GGGCAAGAAGGAGACGTTGGTG | GAAGAT |
| 2060 | E35SaCas9KKH19 | exon35 | SaCas9KKH | − | CAGTTTTGGGCAAGAAGGAGAC | GTTGGT |
| 2061 | E35SaCas9KKH20 | exon35 | SaCas9KKH | − | CAGAGGTAGGAGAGGCCTTGAA | AACAGT |
| 2062 | E35SaCas9KKH21 | exon35 | SaCas9KKH | − | AGGTGCACCTGAAGAGTATCAC | AGAGGT |
| 2063 | E35SaCas9KKH22 | exon35 | SaCas9KKH | − | TGAGAAACAGAAGGTGCACCTG | AAGAGT |
| 2064 | E35SaCas9KKH23 | exon35 | SaCas9KKH | − | CTCAAAAAGAGATTGAGAAACA | GAAGGT |
| 2065 | E35SaCas9KKH24 | exon35 | SaCas9KKH | − | CCTTTTCACAGGCTACTCAAAA | AGAGAT |
| 2066 | E36SaCas9KKH1 | exon36 | SaCas9KKH | + | CTTAAGCACGTCTTCTTTTTGC | TGGGGT |
| 2067 | E36SaCas9KKH2 | exon36 | SaCas9KKH | + | TTTTTGCTGGGGTTTCTTTTTC | TCTGAT |
| 2068 | E36SaCas9KKH3 | exon36 | SaCas9KKH | + | TTTCTTTTTCTCTGATTCATCC | AAAAGT |
| 2069 | E36SaCas9KKH4 | exon36 | SaCas9KKH | + | ATTCATCCAAAAGTGTGTCAGC | CTGAAT |
| 2070 | E36SaCas9KKH5 | exon36 | SaCas9KKH | + | CATCCAAAAGTGTGTCAGCCTG | AATGAT |
| 2071 | E36SaCas9KKH6 | exon36 | SaCas9KKH | + | TGTCAGCCTGAATGATCCACTT | TGTGAT |
| 2072 | E36SaCas9KKH7 | exon36 | SaCas9KKH | + | GCCTGAATGATCCACTTTGTGA | TGTGGT |
| 2073 | E36SaCas9KKH8 | exon36 | SaCas9KKH | + | CACTTTGTGATGTGGTCCACAT | TCTGGT |
| 2074 | E36SaCas9KKH9 | exon36 | SaCas9KKH | + | TGATGTGGTCCACATTCTGGTC | AAAAGT |
| 2075 | E36SaCas9KKH10 | exon36 | SaCas9KKH | + | TGGTCAAAAGTTTCCATGTGTT | TCTGGT |
| 2076 | E36SaCas9KKH11 | exon36 | SaCas9KKH | + | TTTCCATGTGTTTCTGGTATTC | CTTAAT |
| 2077 | E36SaCas9KKH15 | exon36 | SaCas9KKH | − | AAAAGAAGACGTGCTTAAGGTA | GCAAAT |
| 2078 | E36SaCas9KKH16 | exon36 | SaCas9KKH | − | CCCAGCAAAAAGAAGACGTGCT | TAAGGT |
| 2079 | E36SaCas9KKH17 | exon36 | SaCas9KKH | − | ATTCAGGCTGACACACTTTTGG | ATGAAT |
| 2080 | E36SaCas9KKH18 | exon36 | SaCas9KKH | − | GATCATTCAGGCTGACACACTT | TTGGAT |
| 2081 | E36SaCas9KKH19 | exon36 | SaCas9KKH | − | AGAATGTGGACCACATCACAAA | GTGGAT |
| 2082 | E36SaCas9KKH20 | exon36 | SaCas9KKH | − | GACCAGAATGTGGACCACATCA | CAAAGT |
| 2083 | E36SaCas9KKH21 | exon36 | SaCas9KKH | − | GAAACACATGGAAACTTTTGAC | CAGAAT |
| 2084 | E37SaCas9KKH1 | exon37 | SaCas9KKH | + | TTGGAGTAGATCTTCCTACCTT | TCCAGT |
| 2085 | E37SaCas9KKH2 | exon37 | SaCas9KKH | + | TAGATCTTCCTACCTTTCCAGT | CTTAAT |
| 2086 | E37SaCas9KKH3 | exon37 | SaCas9KKH | + | CCTTTCCAGTCTTAATTCTGTG | TGAAAT |
| 2087 | E37SaCas9KKH4 | exon37 | SaCas9KKH | + | CTTAATTCTGTGTGAAATGGCT | GCAAAT |
| 2088 | E37SaCas9KKH5 | exon37 | SaCas9KKH | + | ATTCTGTGTGAAATGGCTGCAA | ATCGAT |
| 2089 | E37SaCas9KKH6 | exon37 | SaCas9KKH | + | CTGTGTGAAATGGCTGCAAATC | GATGGT |
| 2090 | E37SaCas9KKH7 | exon37 | SaCas9KKH | + | CTGCAAATCGATGGTTGAGCTC | TGAGAT |
| 2091 | E37SaCas9KKH8 | exon37 | SaCas9KKH | + | GAGCTCTGAGATTTGGGGCTCT | ACTAAT |
| 2092 | E37SaCas9KKH9 | exon37 | SaCas9KKH | + | ATTTGGGGCTCTACTAATTTCC | TGCAGT |
| 2093 | E37SaCas9KKH10 | exon37 | SaCas9KKH | + | TGGGGCTCTACTAATTTCCTGC | AGTGGT |
| 2094 | E37SaCas9KKH11 | exon37 | SaCas9KKH | + | ACTAATTTCCTGCAGTGGTCAC | CGCGGT |
| 2095 | E37SaCas9KKH12 | exon37 | SaCas9KKH | + | CAGTGGTCACCGCGGTTTGCCA | TCAAGT |
| 2096 | E37SaCas9KKH13 | exon37 | SaCas9KKH | + | CGGTTTGCCATCAAGTTTGCTG | CTTGGT |
| 2097 | E37SaCas9KKH14 | exon37 | SaCas9KKH | + | AAGTTTGCTGCTTGGTCACGTG | TAGAGT |
| 2098 | E37SaCas9KKH15 | exon37 | SaCas9KKH | + | GTCCACCTTTGGGCGTATGTCA | TTCAGT |
| 2099 | E37SaCas9KKH19 | exon37 | SaCas9KKH | − | TTTCACACAGAATTAAGACTGG | AAAGGT |
| 2100 | E37SaCas9KKH20 | exon37 | SaCas9KKH | − | ATCGATTTGCAGCCATTTCACA | CAGAAT |
| 2101 | E37SaCas9KKH21 | exon37 | SaCas9KKH | − | CCCCAAATCTCAGAGCTCAACC | ATCGAT |
| 2102 | E37SaCas9KKH22 | exon37 | SaCas9KKH | − | ACTGCAGGAAATTAGTAGAGCC | CCAAAT |
| 2103 | E37SaCas9KKH23 | exon37 | SaCas9KKH | − | ACCGCGGTGACCACTGCAGGAA | ATTAGT |
| 2104 | E37SaCas9KKH24 | exon37 | SaCas9KKH | − | GCAAACCGCGGTGACCACTGCA | GGAAAT |
| 2105 | E37SaCas9KKH25 | exon37 | SaCas9KKH | − | AGCAGCAAACTTGATGGCAAAC | CGCGGT |
| 2106 | E37SaCas9KKH26 | exon37 | SaCas9KKH | − | CTACACGTGACCAAGCAGCAAA | CTTGAT |
| 2107 | E37SaCas9KKH27 | exon37 | SaCas9KKH | − | CAGAACTGAATGACATACGCCC | AAAGGT |
| 2108 | E37SaCas9KKH28 | exon37 | SaCas9KKH | − | AATATAGCGTTTAAAGGCAGAA | CTGAAT |
| 2109 | E38SaCas9KKH2 | exon38 | SaCas9KKH | + | AACCAATTTACCATATCTTTAT | TGAAGT |
| 2110 | E38SaCas9KKH3 | exon38 | SaCas9KKH | + | TCTTTATTGAAGTCTTCCTCTT | TCAGAT |
| 2111 | E38SaCas9KKH4 | exon38 | SaCas9KKH | + | CCTCTTTCAGATTCACCCCCTG | CTGAAT |
| 2112 | E38SaCas9KKH5 | exon38 | SaCas9KKH | + | CACCCCCTGCTGAATTTCAGCC | TCCAGT |
| 2113 | E38SaCas9KKH6 | exon38 | SaCas9KKH | + | CCCCTGCTGAATTTCAGCCTCC | AGTGGT |
| 2114 | E38SaCas9KKH7 | exon38 | SaCas9KKH | + | AATTTCAGCCTCCAGTGGTTCA | AGCAAT |
| 2115 | E38SaCas9KKH8 | exon38 | SaCas9KKH | + | GGTTCAAGCAATTTTTGTATAT | CTGAGT |
| 2116 | E38SaCas9KKH9 | exon38 | SaCas9KKH | + | TTGTATATCTGAGTTAAACTGC | TCCAAT |
| 2117 | E38SaCas9KKH10 | exon38 | SaCas9KKH | + | TAAACTGCTCCAATTCCTTCAA | AGGAAT |
| 2118 | E38SaCas9KKH18 | exon38 | SaCas9KKH | − | GGAAGACTTCAATAAAGATATG | GTAAAT |
| 2119 | E38SaCas9KKH19 | exon38 | SaCas9KKH | − | AAGAGGAAGACTTCAATAAAGA | TATGGT |
| 2120 | E38SaCas9KKH20 | exon38 | SaCas9KKH | − | TCTGAAAGAGGAAGACTTCAAT | AAAGAT |
| 2121 | E38SaCas9KKH21 | exon38 | SaCas9KKH | − | GGTGAATCTGAAAGAGGAAGAC | TTCAAT |
| 2122 | E38SaCas9KKH22 | exon38 | SaCas9KKH | − | GGAGGCTGAAATTCAGCAGGGG | GTGAAT |
| 2123 | E38SaCas9KKH23 | exon38 | SaCas9KKH | − | CACTGGAGGCTGAAATTCAGCA | GGGGGT |
| 2124 | E38SaCas9KKH24 | exon38 | SaCas9KKH | − | AATTGCTTGAACCACTGGAGGC | TGAAAT |
| 2125 | E38SaCas9KKH25 | exon38 | SaCas9KKH | − | GAGCAGTTTAACTCAGATATAC | AAAAAT |
| 2126 | E38SaCas9KKH26 | exon38 | SaCas9KKH | − | GAAGGAATTGGAGCAGTTTAAC | TCAGAT |
| 2127 | E38SaCas9KKH27 | exon38 | SaCas9KKH | − | TCCATTCCTTTGAAGGAATTGG | AGCAGT |
| 2128 | E38SaCas9KKH28 | exon38 | SaCas9KKH | − | TTTTAGGCCTCCATTCCTTTGA | AGGAAT |
| 2129 | E39SaCas9KKH2 | exon39 | SaCas9KKH | + | TTTCCTCTCGCTTTCTCTCATC | TGTGAT |
| 2130 | E39SaCas9KKH3 | exon39 | SaCas9KKH | + | CTCTCATCTGTGATTCTTTGTT | GTAAGT |
| 2131 | E39SaCas9KKH4 | exon39 | SaCas9KKH | + | TTGTAAGTTGTCTCCTCTTTGC | AACAAT |
| 2132 | E39SaCas9KKH5 | exon39 | SaCas9KKH | + | CTCCTCTTTGCAACAATTCTTT | TACAGT |
| 2133 | E39SaCas9KKH6 | exon39 | SaCas9KKH | + | ACAGTACCCTCATTGTCTTCAT | TCTGAT |
| 2134 | E39SaCas9KKH11 | exon39 | SaCas9KKH | − | TACAGACAAAACATAATGCTCT | CAAGGT |
| 2135 | E39SaCas9KKH12 | exon39 | SaCas9KKH | − | ACAGCAGCTGTTACAGACAAAA | CATAAT |
| 2136 | E39SaCas9KKH13 | exon39 | SaCas9KKH | − | ATGAGAGAAAGCGAGAGGAAAT | AAAGAT |
| 2137 | E39SaCas9KKH14 | exon39 | SaCas9KKH | − | TCACAGATGAGAGAAAGCGAGA | GGAAAT |
| 2138 | E39SaCas9KKH15 | exon39 | SaCas9KKH | − | AGACAACTTACAACAAAGAATC | ACAGAT |
| 2139 | E39SaCas9KKH16 | exon39 | SaCas9KKH | − | AAAGAGGAGACAACTTACAACA | AAGAAT |
| 2140 | E39SaCas9KKH17 | exon39 | SaCas9KKH | − | GAAGACAATGAGGGTACTGTAA | AAGAAT |
| 2141 | E39SaCas9KKH18 | exon39 | SaCas9KKH | − | TTTTGATCAGAATGAAGACAAT | GAGGGT |
| 2142 | E39SaCas9KKH19 | exon39 | SaCas9KKH | − | TGTTGTTTTTGATCAGAATGAA | GACAAT |
| 2143 | E40SaCas9KKH1 | exon40 | SaCas9KKH | + | TATTTTCCTTTCATCTCTGGGC | TCAGGT |
| 2144 | E40SaCas9KKH2 | exon40 | SaCas9KKH | + | ATCTCTGGGCTCAGGTAGGCTG | GCTAAT |
| 2145 | E40SaCas9KKH3 | exon40 | SaCas9KKH | + | CAGGTAGGCTGGCTAATTTTTT | TTCAAT |
| 2146 | E40SaCas9KKH4 | exon40 | SaCas9KKH | + | TCAATGTCATCCAAGCATTTCA | GGAGAT |
| 2147 | E40SaCas9KKH5 | exon40 | SaCas9KKH | + | AGATCATCAGCCTGCCTCTTGT | ACTGAT |
| 2148 | E40SaCas9KKH6 | exon40 | SaCas9KKH | + | GCCTGCCTCTTGTACTGATACC | ACTGAT |
| 2149 | E40SaCas9KKH7 | exon40 | SaCas9KKH | + | TCTTGTACTGATACCACTGATG | AGAAAT |
| 2150 | E40SaCas9KKH8 | exon40 | SaCas9KKH | + | GCCTTTTTTCTTCTTTGAGACC | TCAAAT |
| 2151 | E40SaCas9KKH14 | exon40 | SaCas9KKH | − | CCAGAGATGAAAGGAAAATAAA | GGTAAT |
| 2152 | E40SaCas9KKH15 | exon40 | SaCas9KKH | − | AGCCCAGAGATGAAAGGAAAAT | AAAGGT |
| 2153 | E40SaCas9KKH16 | exon40 | SaCas9KKH | − | TACCTGAGCCCAGAGATGAAAG | GAAAAT |
| 2154 | E40SaCas9KKH17 | exon40 | SaCas9KKH | − | ATTAGCCAGCCTACCTGAGCCC | AGAGAT |
| 2155 | E40SaCas9KKH18 | exon40 | SaCas9KKH | − | AAATGCTTGGATGACATTGAAA | AAAAAT |
| 2156 | E40SaCas9KKH19 | exon40 | SaCas9KKH | − | GGCTGATGATCTCCTGAAATGC | TTGGAT |
| 2157 | E40SaCas9KKH20 | exon40 | SaCas9KKH | − | AAGAGGCAGGCTGATGATCTCC | TGAAAT |
| 2158 | E40SaCas9KKH21 | exon40 | SaCas9KKH | − | GTATCAGTACAAGAGGCAGGCT | GATGAT |
| 2159 | E40SaCas9KKH22 | exon40 | SaCas9KKH | − | GTGGTATCAGTACAAGAGGCAG | GCTGAT |
| 2160 | E40SaCas9KKH23 | exon40 | SaCas9KKH | − | CTAGAAATTTCTCATCAGTGGT | ATCAGT |
| 2161 | E40SaCas9KKH24 | exon40 | SaCas9KKH | − | AAGGCTCTAGAAATTTCTCATC | AGTGGT |
| 2162 | E40SaCas9KKH25 | exon40 | SaCas9KKH | − | AAAAAGGCTCTAGAAATTTCTC | ATCAGT |
| 2163 | E40SaCas9KKH26 | exon40 | SaCas9KKH | − | CTCAAAGAAGAAAAAAGGCTCT | AGAAAT |
| 2164 | E40SaCas9KKH27 | exon40 | SaCas9KKH | − | TGTCTGCACCATGAACAGGATT | TGAGGT |
| 2165 | E41SaCas9KKH2 | exon41 | SaCas9KKH | + | CAGTAACAACTCACAATTTGTG | CAAAGT |
| 2166 | E41SaCas9KKH3 | exon41 | SaCas9KKH | + | ACAACTCACAATTTGTGCAAAG | TTGAGT |
| 2167 | E41SaCas9KKH4 | exon41 | SaCas9KKH | + | AAAGTTGAGTCTTCGAAACTGA | GCAAAT |
| 2168 | E41SaCas9KKH5 | exon41 | SaCas9KKH | + | TTCGAAACTGAGCAAATTTGCT | CTCAAT |
| 2169 | E41SaCas9KKH6 | exon41 | SaCas9KKH | + | TTTCCCGCCAGCGCTTGCTGAG | CTGGAT |
| 2170 | E41SaCas9KKH7 | exon41 | SaCas9KKH | + | GCCAGCGCTTGCTGAGCTGGAT | CTGAGT |
| 2171 | E41SaCas9KKH8 | exon41 | SaCas9KKH | + | ATTCAGCTCCTCTTTCTTCTTC | TGCAAT |
| 2172 | E41SaCas9KKH9 | exon41 | SaCas9KKH | + | TCCTCTTTCTTCTTCTGCAATT | CCCGAT |
| 2173 | E41SaCas9KKH10 | exon41 | SaCas9KKH | + | CTTTCTTCTTCTGCAATTCCCG | ATCAAT |
| 2174 | E41SaCas9KKH12 | exon41 | SaCas9KKH | − | AAGACTCAACTTTGCACAAATT | GTGAGT |
| 2175 | E41SaCas9KKH13 | exon41 | SaCas9KKH | − | AGTTTCGAAGACTCAACTTTGC | ACAAAT |
| 2176 | E41SaCas9KKH14 | exon41 | SaCas9KKH | − | CGGGAAATTGAGAGCAAATTTG | CTCAGT |
| 2177 | E41SaCas9KKH15 | exon41 | SaCas9KKH | − | AAGCGCTGGCGGGAAATTGAGA | GCAAAT |
| 2178 | E41SaCas9KKH16 | exon41 | SaCas9KKH | − | TCCAGCTCAGCAAGCGCTGGCG | GGAAAT |
| 2179 | E41SaCas9KKH17 | exon41 | SaCas9KKH | − | CCGCAATGGCAGTGGAGCCAAC | TCAGAT |
| 2180 | E41SaCas9KKH18 | exon41 | SaCas9KKH | − | TGTCTGAGGATGGGGCCGCAAT | GGCAGT |
| 2181 | E41SaCas9KKH19 | exon41 | SaCas9KKH | − | AGGGCTTGTCTGAGGATGGGGC | CGCAAT |
| 2182 | E41SaCas9KKH20 | exon41 | SaCas9KKH | − | TAGGCAAGCTGAGGGCTTGTCT | GAGGAT |
| 2183 | E41SaCas9KKH21 | exon41 | SaCas9KKH | − | AGAAGAAGAAAGAGGAGCTGAA | TGCAGT |
| 2184 | E41SaCas9KKH22 | exon41 | SaCas9KKH | − | ATTGCAGAAGAAGAAAGAGGAG | CTGAAT |
| 2185 | E41SaCas9KKH23 | exon41 | SaCas9KKH | − | TTTGCTCAATAGGAAATTGATC | GGGAAT |
| 2186 | E42SaCas9KKH1 | exon42 | SaCas9KKH | + | TTCAGAGACTCCTCTTGCTTAA | AGAGAT |
| 2187 | E42SaCas9KKH2 | exon42 | SaCas9KKH | + | TCCTCTTGCTTAAAGAGATCTT | CAAAGT |
| 2188 | E42SaCas9KKH3 | exon42 | SaCas9KKH | + | AGATCTTCAAAGTCCTTAGCAC | AGAGGT |
| 2189 | E42SaCas9KKH4 | exon42 | SaCas9KKH | + | AGCACAGAGGTCAGGAGCATTG | AGAAGT |
| 2190 | E42SaCas9KKH5 | exon42 | SaCas9KKH | + | AGCATTGAGAAGTTGTTCCACT | TCTAAT |
| 2191 | E42SaCas9KKH6 | exon42 | SaCas9KKH | + | CTTCTAATAGGGCTTGTGAGAC | ATGAGT |
| 2192 | E42SaCas9KKH7 | exon42 | SaCas9KKH | + | CTAATAGGGCTTGTGAGACATG | AGTGAT |
| 2193 | E42SaCas9KKH8 | exon42 | SaCas9KKH | + | GGGCTTGTGAGACATGAGTGAT | TTCAGT |
| 2194 | E42SaCas9KKH9 | exon42 | SaCas9KKH | + | TGTGAGACATGAGTGATTTCAG | TCAAAT |
| 2195 | E42SaCas9KKH10 | exon42 | SaCas9KKH | + | AGACATGAGTGATTTCAGTCAA | ATAAGT |
| 2196 | E42SaCas9KKH11 | exon42 | SaCas9KKH | + | TCAAATAAGTAGAAGGCACATA | AGAAAT |
| 2197 | E42SaCas9KKH12 | exon42 | SaCas9KKH | + | AAGAAATTTCCAAAGGCATGTC | TTCAGT |
| 2198 | E42SaCas9KKH13 | exon42 | SaCas9KKH | + | TCACCATCATCGTTTCTTCACG | GACAGT |
| 2199 | E42SaCas9KKH14 | exon42 | SaCas9KKH | + | ATCGTTTCTTCACGGACAGTGT | GCTGGT |
| 2200 | E42SaCas9KKH17 | exon42 | SaCas9KKH | − | TCTTTAAGCAAGAGGAGTCTCT | GAAGGT |
| 2201 | E42SaCas9KKH18 | exon42 | SaCas9KKH | − | TTTGAAGATCTCTTTAAGCAAG | AGGAGT |
| 2202 | E42SaCas9KKH19 | exon42 | SaCas9KKH | − | TGACCTCTGTGCTAAGGACTTT | GAAGAT |
| 2203 | E42SaCas9KKH20 | exon42 | SaCas9KKH | − | CCTATTAGAAGTGGAACAACTT | CTCAAT |
| 2204 | E42SaCas9KKH21 | exon42 | SaCas9KKH | − | CTCATGTCTCACAAGCCCTATT | AGAAGT |
| 2205 | E42SaCas9KKH22 | exon42 | SaCas9KKH | − | ATGTGCCTTCTACTTATTTGAC | TGAAAT |
| 2206 | E42SaCas9KKH23 | exon42 | SaCas9KKH | − | TGATGACTGAAGACATGCCTTT | GGAAAT |
| 2207 | E42SaCas9KKH24 | exon42 | SaCas9KKH | − | CTGTCCGTGAAGAAACGATGAT | GGTGAT |
| 2208 | E42SaCas9KKH25 | exon42 | SaCas9KKH | − | ACACTGTCCGTGAAGAAACGAT | GATGGT |
| 2209 | E42SaCas9KKH26 | exon42 | SaCas9KKH | − | AGCACACTGTCCGTGAAGAAAC | GATGAT |
| 2210 | E42SaCas9KKH27 | exon42 | SaCas9KKH | − | ACCAGCACACTGTCCGTGAAGA | AACGAT |
| 2211 | E43SaCas9KKH1 | exon43 | SaCas9KKH | + | AATATATGTGTTACCTACCCTT | GTCGGT |
| 2212 | E43SaCas9KKH2 | exon43 | SaCas9KKH | + | ATTTTGTTAACTTTTTCCCATT | GGAAAT |
| 2213 | E43SaCas9KKH3 | exon43 | SaCas9KKH | + | CCTTTCCACAGGCGTTGCACTT | TGCAAT |
| 2214 | E43SaCas9KKH4 | exon43 | SaCas9KKH | + | GCAATGCTGCTGTCTTCTTGCT | ATGAAT |
| 2215 | E43SaCas9KKH5 | exon43 | SaCas9KKH | + | ATGCTGCTGTCTTCTTGCTATG | AATAAT |
| 2216 | E43SaCas9KKH6 | exon43 | SaCas9KKH | + | CTGTCTTCTTGCTATGAATAAT | GTCAAT |
| 2217 | E43SaCas9KKH7 | exon43 | SaCas9KKH | + | TTGTAGACTATCTTTTATATTC | TGTAAT |
| 2218 | E43SaCas9KKH11 | exon43 | SaCas9KKH | − | AAATGTACAAGGACCGACAAGG | GTAGGT |
| 2219 | E43SaCas9KKH12 | exon43 | SaCas9KKH | − | AACAAAATGTACAAGGACCGAC | AAGGGT |
| 2220 | E43SaCas9KKH13 | exon43 | SaCas9KKH | − | ATTTCCAATGGGAAAAAGTTAA | CAAAAT |
| 2221 | E43SaCas9KKH14 | exon43 | SaCas9KKH | − | CCCAGCTTGATTTCCAATGGGA | AAAAGT |
| 2222 | E43SaCas9KKH15 | exon43 | SaCas9KKH | − | GAAGCTCTCTCCCAGCTTGATT | TCCAAT |
| 2223 | E43SaCas9KKH16 | exon43 | SaCas9KKH | − | GCTACAGGAAGCTCTCTCCCAG | CTTGAT |
| 2224 | E43SaCas9KKH17 | exon43 | SaCas9KKH | − | TGCAAAGTGCAACGCCTGTGGA | AAGGGT |
| 2225 | E43SaCas9KKH18 | exon43 | SaCas9KKH | − | TAGCAAGAAGACAGCAGCATTG | CAAAGT |
| 2226 | E43SaCas9KKH19 | exon43 | SaCas9KKH | − | ATAGTCTACAACAAAGCTCAGG | TCGGAT |
| 2227 | E43SaCas9KKH20 | exon43 | SaCas9KKH | − | AAAAGATAGTCTACAACAAAGC | TCAGGT |
| 2228 | E43SaCas9KKH21 | exon43 | SaCas9KKH | − | TTTTATATTACAGAATATAAAA | GATAGT |
| 2229 | E43SaCas9KKH22 | exon43 | SaCas9KKH | − | AATTTTTATATTACAGAATATA | AAAGAT |
| 2230 | E46SaCas9KKH2 | exon46 | SaCas9KKH | + | CTTGACTTGCTCAAGCTTTTCT | TTTAGT |
| 2231 | E46SaCas9KKH3 | exon46 | SaCas9KKH | + | TTCTTTTAGTTGCTGCTCTTTT | CCAGGT |
| 2232 | E46SaCas9KKH4 | exon46 | SaCas9KKH | + | TAGTTGCTGCTCTTTTCCAGGT | TCAAGT |
| 2233 | E46SaCas9KKH5 | exon46 | SaCas9KKH | + | GCTGCTCTTTTCCAGGTTCAAG | TGGGAT |
| 2234 | E46SaCas9KKH6 | exon46 | SaCas9KKH | + | TTCCAGGTTCAAGTGGGATACT | AGCAAT |
| 2235 | E46SaCas9KKH7 | exon46 | SaCas9KKH | + | ATCTGCTTCCTCCAACCATAAA | ACAAAT |
| 2236 | E46SaCas9KKH8 | exon46 | SaCas9KKH | + | TCCAACCATAAAACAAATTCAT | TTAAAT |
| 2237 | E46SaCas9KKH9 | exon46 | SaCas9KKH | + | AACAAATTCATTTAAATCTCTT | TGAAAT |
| 2238 | E46SaCas9KKH10 | exon46 | SaCas9KKH | + | TTAAATCTCTTTGAAATTCTGA | CAAGAT |
| 2239 | E46SaCas9KKH14 | exon46 | SaCas9KKH | − | AAGAAAAGCTTGAGCAAGTCAA | GGTAAT |
| 2240 | E46SaCas9KKH15 | exon46 | SaCas9KKH | − | TAAAAGAAAAGCTTGAGCAAGT | CAAGGT |
| 2241 | E46SaCas9KKH16 | exon46 | SaCas9KKH | − | AGCAACTAAAAGAAAAGCTTGA | GCAAGT |
| 2242 | E46SaCas9KKH17 | exon46 | SaCas9KKH | − | GTTGGAGGAAGCAGATAACATT | GCTAGT |
| 2243 | E46SaCas9KKH18 | exon46 | SaCas9KKH | − | ATTTGTTTTATGGTTGGAGGAA | GCAGAT |
| 2244 | E46SaCas9KKH19 | exon46 | SaCas9KKH | − | AGAGATTTAAATGAATTTGTTT | TATGGT |
| 2245 | E46SaCas9KKH20 | exon46 | SaCas9KKH | − | TCAGAATTTCAAAGAGATTTAA | ATGAAT |
| 2246 | E46SaCas9KKH21 | exon46 | SaCas9KKH | − | CTTGTCAGAATTTCAAAGAGAT | TTAAAT |
| 2247 | E46SaCas9KKH22 | exon46 | SaCas9KKH | − | GAATATCTTGTCAGAATTTCAA | AGAGAT |
| 2248 | E46SaCas9KKH23 | exon46 | SaCas9KKH | − | GAAGAACAAAAGAATATCTTGT | CAGAAT |
| 2249 | E46SaCas9KKH24 | exon46 | SaCas9KKH | − | TTTCTCCAGGCTAGAAGAACAA | AAGAAT |
| 2250 | E47SaCas9KKH1 | exon47 | SaCas9KKH | + | TAATGTCTAACCTTTATCCACT | GGAGAT |
| 2251 | E47SaCas9KKH2 | exon47 | SaCas9KKH | + | ATTTGTCTGCTTGAGCTTATTT | TCAAGT |
| 2252 | E47SaCas9KKH3 | exon47 | SaCas9KKH | + | GCTTATGGGAGCACTTACAAGC | ACGGGT |
| 2253 | E47SaCas9KKH4 | exon47 | SaCas9KKH | + | GAGCACTTACAAGCACGGGTCC | TCCAGT |
| 2254 | E47SaCas9KKH5 | exon47 | SaCas9KKH | + | AAGCACGGGTCCTCCAGTTTCA | TTTAAT |
| 2255 | E47SaCas9KKH6 | exon47 | SaCas9KKH | + | CTCCAGTTTCATTTAATTGTTT | GAGAAT |
| 2256 | E47SaCas9KKH7 | exon47 | SaCas9KKH | + | CTGGCGCAGGGGCAACTCTTCC | ACCAGT |
| 2257 | E47SaCas9KKH10 | exon47 | SaCas9KKH | − | AGCAGACAAATCTCCAGTGGAT | AAAGGT |
| 2258 | E47SaCas9KKH11 | exon47 | SaCas9KKH | − | AGCTCAAGCAGACAAATCTCCA | GTGGAT |
| 2259 | E47SaCas9KKH12 | exon47 | SaCas9KKH | − | AATAAGCTCAAGCAGACAAATC | TCCAGT |
| 2260 | E47SaCas9KKH13 | exon47 | SaCas9KKH | − | ACTTGAAAATAAGCTCAAGCAG | ACAAAT |
| 2261 | E47SaCas9KKH14 | exon47 | SaCas9KKH | − | CCCAGAAGAGCAAGATAAACTT | GAAAAT |
| 2262 | E47SaCas9KKH15 | exon47 | SaCas9KKH | − | TGCTCCCATAAGCCCAGAAGAG | CAAGAT |
| 2263 | E47SaCas9KKH16 | exon47 | SaCas9KKH | − | TGAAACTGGAGGACCCGTGCTT | GTAAGT |
| 2264 | E47SaCas9KKH17 | exon47 | SaCas9KKH | − | GCGCCAGGGAATTCTCAAACAA | TTAAAT |
| 2265 | E47SaCas9KKH18 | exon47 | SaCas9KKH | − | CCCCTGCGCCAGGGAATTCTCA | AACAAT |
| 2266 | E47SaCas9KKH19 | exon47 | SaCas9KKH | − | TGGAAGAGTTGCCCCTGCGCCA | GGGAAT |
| 2267 | E47SaCas9KKH20 | exon47 | SaCas9KKH | − | TGTCTGTTTCAGTTACTGGTGG | AAGAGT |
| 2268 | E48SaCas9KKH1 | exon48 | SaCas9KKH | + | CAAAAAGTTCCCTACCTTAACG | TCAAAT |
| 2269 | E48SaCas9KKH2 | exon48 | SaCas9KKH | + | AAAGTTCCCTACCTTAACGTCA | AATGGT |
| 2270 | E48SaCas9KKH3 | exon48 | SaCas9KKH | + | ACCTTAACGTCAAATGGTCCTT | CTTGGT |
| 2271 | E48SaCas9KKH4 | exon48 | SaCas9KKH | + | AACGTCAAATGGTCCTTCTTGG | TTTGGT |
| 2272 | E48SaCas9KKH5 | exon48 | SaCas9KKH | + | TCAAATGGTCCTTCTTGGTTTG | GTTGGT |
| 2273 | E48SaCas9KKH6 | exon48 | SaCas9KKH | + | GTCCTTCTTGGTTTGGTTGGTT | ATAAAT |
| 2274 | E48SaCas9KKH7 | exon48 | SaCas9KKH | + | TTTGGTTGGTTATAAATTTCCA | ACTGAT |
| 2275 | E48SaCas9KKH8 | exon48 | SaCas9KKH | + | GGTTATAAATTTCCAACTGATT | CCTAAT |
| 2276 | E48SaCas9KKH9 | exon48 | SaCas9KKH | + | AATTTCCAACTGATTCCTAATA | GGAGAT |
| 2277 | E48SaCas9KKH10 | exon48 | SaCas9KKH | + | CTAATAGGAGATAACCACAGCA | GCAGAT |
| 2278 | E48SaCas9KKH11 | exon48 | SaCas9KKH | + | ATAGGAGATAACCACAGCAGCA | GATGAT |
| 2279 | E48SaCas9KKH12 | exon48 | SaCas9KKH | + | AGCAGATGATTTAACTGCTCTT | CAAGGT |
| 2280 | E48SaCas9KKH13 | exon48 | SaCas9KKH | + | TCAAGCTTTTTTTCAAGCTGCC | CAAGGT |
| 2281 | E48SaCas9KKH14 | exon48 | SaCas9KKH | + | GCCCAAGGTCTTTTATTTGAGC | TTCAAT |
| 2282 | E48SaCas9KKH15 | exon48 | SaCas9KKH | + | AGCTTCAATTTCTCCTTGTTTC | TCAGGT |
| 2283 | E48SaCas9KKH20 | exon48 | SaCas9KKH | − | ACCAAGAAGGACCATTTGACGT | TAAGGT |
| 2284 | E48SaCas9KKH21 | exon48 | SaCas9KKH | − | TATCTCCTATTAGGAATCAGTT | GGAAAT |
| 2285 | E48SaCas9KKH22 | exon48 | SaCas9KKH | − | CTGTGGTTATCTCCTATTAGGA | ATCAGT |
| 2286 | E48SaCas9KKH23 | exon48 | SaCas9KKH | − | GCTGCTGTGGTTATCTCCTATT | AGGAAT |
| 2287 | E48SaCas9KKH24 | exon48 | SaCas9KKH | − | GAGCAGTTAAATCATCTGCTGC | TGTGGT |
| 2288 | E48SaCas9KKH25 | exon48 | SaCas9KKH | − | GCTTGAAGACCTTGAAGAGCAG | TTAAAT |
| 2289 | E48SaCas9KKH26 | exon48 | SaCas9KKH | − | AAAAAGCTTGAAGACCTTGAAG | AGCAGT |
| 2290 | E48SaCas9KKH27 | exon48 | SaCas9KKH | − | AGAAACAAGGAGAAATTGAAGC | TCAAAT |
| 2291 | E48SaCas9KKH28 | exon48 | SaCas9KKH | − | GAGCTTTACCTGAGAAACAAGG | AGAAAT |
| 2292 | E49SaCas9KKH1 | exon49 | SaCas9KKH | + | GTTGCTTCATTACCTTCACTGG | CTGAGT |
| 2293 | E49SaCas9KKH2 | exon49 | SaCas9KKH | + | CATTACCTTCACTGGCTGAGTG | GCTGGT |
| 2294 | E49SaCas9KKH3 | exon49 | SaCas9KKH | + | TGAGTGGCTGGTTTTTCCTTGT | ACAAAT |
| 2295 | E49SaCas9KKH4 | exon49 | SaCas9KKH | + | TGTACAAATGCTGCCCTTTAGA | CAAAAT |
| 2296 | E49SaCas9KKH5 | exon49 | SaCas9KKH | + | TTTAGACAAAATCTCTTCCACA | TCCGGT |
| 2297 | E49SaCas9KKH6 | exon49 | SaCas9KKH | + | GTTGTTTAGCTTGAACTGCTAT | TTCAGT |
| 2298 | E49SaCas9KKH10 | exon49 | SaCas9KKH | − | AACCAGCCACTCAGCCAGTGAA | GGTAAT |
| 2299 | E49SaCas9KKH11 | exon49 | SaCas9KKH | − | AAAAACCAGCCACTCAGCCAGT | GAAGGT |
| 2300 | E49SaCas9KKH12 | exon49 | SaCas9KKH | − | ACAAGGAAAAACCAGCCACTCA | GCCAGT |
| 2301 | E49SaCas9KKH13 | exon49 | SaCas9KKH | − | AAGCTAAACAACCGGATGTGGA | AGAGAT |
| 2302 | E49SaCas9KKH14 | exon49 | SaCas9KKH | − | AATAGCAGTTCAAGCTAAACAA | CCGGAT |
| 2303 | E49SaCas9KKH15 | exon49 | SaCas9KKH | − | CTTTTCCCCAGGAAACTGAAAT | AGCAGT |
| 2304 | E49SaCas9KKH16 | exon49 | SaCas9KKH | − | TGGGTTCTTTTCCCCAGGAAAC | TGAAAT |
| 2305 | E52SaCas9KKH2 | exon52 | SaCas9KKH | + | TGTTAAAAAACTTACTTCGATC | CGTAAT |
| 2306 | E52SaCas9KKH3 | exon52 | SaCas9KKH | + | TAAAAAACTTACTTCGATCCGT | AATGAT |
| 2307 | E52SaCas9KKH4 | exon52 | SaCas9KKH | + | TCCGTAATGATTGTTCTAGCCT | CTTGAT |
| 2308 | E52SaCas9KKH5 | exon52 | SaCas9KKH | + | TGATTGTTCTAGCCTCTTGATT | GCTGGT |
| 2309 | E52SaCas9KKH6 | exon52 | SaCas9KKH | + | TCTTGATTGCTGGTCTTGTTTT | TCAAAT |
| 2310 | E52SaCas9KKH7 | exon52 | SaCas9KKH | + | TCTTGTTTTTCAAATTTTGGGC | AGCGGT |
| 2311 | E52SaCas9KKH8 | exon52 | SaCas9KKH | + | TGTTTTTCAAATTTTGGGCAGC | GGTAAT |
| 2312 | E52SaCas9KKH9 | exon52 | SaCas9KKH | + | TTTCAAATTTTGGGCAGCGGTA | ATGAGT |
| 2313 | E52SaCas9KKH10 | exon52 | SaCas9KKH | + | TCCAACTGGGGACGCCTCTGTT | CCAAAT |
| 2314 | E52SaCas9KKH14 | exon52 | SaCas9KKH | − | AGAACAATCATTACGGATCGAA | GTAAGT |
| 2315 | E52SaCas9KKH15 | exon52 | SaCas9KKH | − | GGCTAGAACAATCATTACGGAT | CGAAGT |
| 2316 | E52SaCas9KKH16 | exon52 | SaCas9KKH | − | TCAAGAGGCTAGAACAATCATT | ACGGAT |
| 2317 | E52SaCas9KKH17 | exon52 | SaCas9KKH | − | AGACCAGCAATCAAGAGGCTAG | AACAAT |
| 2318 | E52SaCas9KKH18 | exon52 | SaCas9KKH | − | CCAAAATTTGAAAAACAAGACC | AGCAAT |
| 2319 | E52SaCas9KKH19 | exon52 | SaCas9KKH | − | GGAAGAACTCATTACCGCTGCC | CAAAAT |
| 2320 | E52SaCas9KKH20 | exon52 | SaCas9KKH | − | CAGGATTTGGAACAGAGGCGTC | CCCAGT |
| 2321 | E52SaCas9KKH21 | exon52 | SaCas9KKH | − | TTTGTTCTTACAGGCAACAATG | CAGGAT |
| 2322 | E54SaCas9KKH1 | exon54 | SaCas9KKH | + | AATAATGTAATTCATACCTTTT | ATGAAT |
| 2323 | E54SaCas9KKH2 | exon54 | SaCas9KKH | + | TATGAATGCTTCTCCAAGAGGC | ATTGAT |
| 2324 | E54SaCas9KKH3 | exon54 | SaCas9KKH | + | TCTCTGTTATCATGTGGACTTT | TCTGGT |
| 2325 | E54SaCas9KKH4 | exon54 | SaCas9KKH | + | TGGACTTTTCTGGTATCATCTG | CAGAAT |
| 2326 | E54SaCas9KKH5 | exon54 | SaCas9KKH | + | ACTTTTCTGGTATCATCTGCAG | AATAAT |
| 2327 | E54SaCas9KKH6 | exon54 | SaCas9KKH | + | ATCATCTGCAGAATAATCCCGG | AGAAGT |
| 2328 | E54SaCas9KKH7 | exon54 | SaCas9KKH | + | TAATCCCGGAGAAGTTTCAGGG | CCAAGT |
| 2329 | E54SaCas9KKH8 | exon54 | SaCas9KKH | + | TCTACATTTGTCTGCCACTGGC | GGAGGT |
| 2330 | E54SaCas9KKH9 | exon54 | SaCas9KKH | + | CGGAGGTCTTTGGCCAACTGCT | ATAGAT |
| 2331 | E54SaCas9KKH12 | exon54 | SaCas9KKH | − | TGGAGAAGCATTCATAAAAGGT | ATGAAT |
| 2332 | E54SaCas9KKH13 | exon54 | SaCas9KKH | − | GCCTCTTGGAGAAGCATTCATA | AAAGGT |
| 2333 | E54SaCas9KKH14 | exon54 | SaCas9KKH | − | AGTCCACATGATAACAGAGAAT | ATCAAT |
| 2334 | E54SaCas9KKH15 | exon54 | SaCas9KKH | − | CAGAAAAGTCCACATGATAACA | GAGAAT |
| 2335 | E54SaCas9KKH16 | exon54 | SaCas9KKH | − | CAGATGATACCAGAAAAGTCCA | CATGAT |
| 2336 | E54SaCas9KKH17 | exon54 | SaCas9KKH | − | ATTATTCTGCAGATGATACCAG | AAAAGT |
| 2337 | E54SaCas9KKH18 | exon54 | SaCas9KKH | − | ACTTCTCCGGGATTATTCTGCA | GATGAT |
| 2338 | E54SaCas9KKH19 | exon54 | SaCas9KKH | − | GAAACTTCTCCGGGATTATTCT | GCAGAT |
| 2339 | E54SaCas9KKH20 | exon54 | SaCas9KKH | − | TGACTTGGCCCTGAAACTTCTC | CGGGAT |
| 2340 | E54SaCas9KKH21 | exon54 | SaCas9KKH | − | GTGGCAGACAAATGTAGATGTG | GCAAAT |
| 2341 | E54SaCas9KKH22 | exon54 | SaCas9KKH | − | CCTCCGCCAGTGGCAGACAAAT | GTAGAT |
| 2342 | E54SaCas9KKH23 | exon54 | SaCas9KKH | − | CAAAGACCTCCGCCAGTGGCAG | ACAAAT |
| 2343 | E54SaCas9KKH24 | exon54 | SaCas9KKH | − | TAGCAGTTGGCCAAAGACCTCC | GCCAGT |
| 2344 | E55SaCas9KKH1 | exon55 | SaCas9KKH | + | TTCATCAGCTCTTTTACTCCCT | TGGAGT |
| 2345 | E55SaCas9KKH2 | exon55 | SaCas9KKH | + | AGTCTTCTAGGAGCCTTTCCTT | ACGGGT |
| 2346 | E55SaCas9KKH3 | exon55 | SaCas9KKH | + | GGGTAGCATCCTGTAGGACATT | GGCAGT |
| 2347 | E55SaCas9KKH4 | exon55 | SaCas9KKH | + | GTAAGCCAGGCAAGAAACTTTT | CCAGGT |
| 2348 | E55SaCas9KKH5 | exon55 | SaCas9KKH | + | TTCCAGGTCCAGGGGGAACTGT | TGCAGT |
| 2349 | E55SaCas9KKH6 | exon55 | SaCas9KKH | + | CAGGTCCAGGGGGAACTGTTGC | AGTAAT |
| 2350 | E55SaCas9KKH7 | exon55 | SaCas9KKH | + | GGGGGAACTGTTGCAGTAATCT | ATGAGT |
| 2351 | E55SaCas9KKH11 | exon55 | SaCas9KKH | − | AGAGCTGATGAAACAATGGCAA | GTAAGT |
| 2352 | E55SaCas9KKH12 | exon55 | SaCas9KKH | − | TAAAAGAGCTGATGAAACAATG | GCAAGT |
| 2353 | E55SaCas9KKH13 | exon55 | SaCas9KKH | − | AAGGGAGTAAAAGAGCTGATGA | AACAAT |
| 2354 | E55SaCas9KKH14 | exon55 | SaCas9KKH | − | AAGACTCCAAGGGAGTAAAAGA | GCTGAT |
| 2355 | E55SaCas9KKH15 | exon55 | SaCas9KKH | − | AAAGGCTCCTAGAAGACTCCAA | GGGAGT |
| 2356 | E55SaCas9KKH16 | exon55 | SaCas9KKH | − | TGAAACAACTGCCAATGTCCTA | CAGGAT |
| 2357 | E55SaCas9KKH17 | exon55 | SaCas9KKH | − | GCTTACAGAAGCTGAAACAACT | GCCAAT |
| 2358 | E55SaCas9KKH18 | exon55 | SaCas9KKH | − | CAACAGTTCCCCCTGGACCTGG | AAAAGT |
| 2359 | E55SaCas9KKH19 | exon55 | SaCas9KKH | − | GAAGAAACTCATAGATTACTGC | AACAGT |
| 2360 | E55SaCas9KKH20 | exon55 | SaCas9KKH | − | GAGGCTGCTTTGGAAGAAACTC | ATAGAT |
| 2361 | E56SaCas9KKH2 | exon56 | SaCas9KKH | + | CCTAATGTTGAGAGACTTTTTC | CGAAGT |
| 2362 | E56SaCas9KKH3 | exon56 | SaCas9KKH | + | TTTTTCCGAAGTTCACTCCACT | TGAAGT |
| 2363 | E56SaCas9KKH4 | exon56 | SaCas9KKH | + | GACTGCATCATCGGAACCTTCC | AGGGAT |
| 2364 | E56SaCas9KKH5 | exon56 | SaCas9KKH | + | CATCGGAACCTTCCAGGGATCT | CAGGAT |
| 2365 | E56SaCas9KKH6 | exon56 | SaCas9KKH | + | AGGATTTTTTGGCTGTTTTCAT | CCAGGT |
| 2366 | E56SaCas9KKH7 | exon56 | SaCas9KKH | + | TTTTGGCTGTTTTCATCCAGGT | TGTGAT |
| 2367 | E56SaCas9KKH8 | exon56 | SaCas9KKH | + | TGTGATAAACATCTGTGTGAGC | TTCAAT |
| 2368 | E56SaCas9KKH9 | exon56 | SaCas9KKH | + | GTGTGAGCTTCAATTTCACCTT | GGAGGT |
| 2369 | E56SaCas9KKH12 | exon56 | SaCas9KKH | − | CTTCGGAAAAAGTCTCTCAACA | TTAGGT |
| 2370 | E56SaCas9KKH13 | exon56 | SaCas9KKH | − | TTCAAGTGGAGTGAACTTCGGA | AAAAGT |
| 2371 | E56SaCas9KKH14 | exon56 | SaCas9KKH | − | TTTGGATAACATGAACTTCAAG | TGGAGT |
| 2372 | E56SaCas9KKH15 | exon56 | SaCas9KKH | − | AGACGTTTGGATAACATGAACT | TCAAGT |
| 2373 | E56SaCas9KKH16 | exon56 | SaCas9KKH | − | TGCAGTCCTGTTACAAAGACGT | TTGGAT |
| 2374 | E56SaCas9KKH17 | exon56 | SaCas9KKH | − | GATCCCTGGAAGGTTCCGATGA | TGCAGT |
| 2375 | E56SaCas9KKH18 | exon56 | SaCas9KKH | − | CCTGAGATCCCTGGAAGGTTCC | GATGAT |
| 2376 | E56SaCas9KKH19 | exon56 | SaCas9KKH | − | AATCCTGAGATCCCTGGAAGGT | TCCGAT |
| 2377 | E56SaCas9KKH20 | exon56 | SaCas9KKH | − | CCAAAAAATCCTGAGATCCCTG | GAAGGT |
| 2378 | E56SaCas9KKH21 | exon56 | SaCas9KKH | − | GATGAAAACAGCCAAAAAATCC | TGAGAT |
| 2379 | E56SaCas9KKH22 | exon56 | SaCas9KKH | − | ACAACCTGGATGAAAACAGCCA | AAAAAT |
| 2380 | E56SaCas9KKH23 | exon56 | SaCas9KKH | − | TCACACAGATGTTTATCACAAC | CTGGAT |
| 2381 | E56SaCas9KKH24 | exon56 | SaCas9KKH | − | CCAAGGTGAAATTGAAGCTCAC | ACAGAT |
| 2382 | E56SaCas9KKH25 | exon56 | SaCas9KKH | − | CTGTCCTGTAGGACCTCCAAGG | TGAAAT |
| 2383 | E56SaCas9KKH26 | exon56 | SaCas9KKH | − | TCCTGCTGTCCTGTAGGACCTC | CAAGGT |
| 2384 | E57SaCas9KKH1 | exon57 | SaCas9KKH | + | TCGTTCTGCTTCTGAACTGCTG | GAAAGT |
| 2385 | E57SaCas9KKH2 | exon57 | SaCas9KKH | + | TCTGAACTGCTGGAAAGTCGCC | TCCAAT |
| 2386 | E57SaCas9KKH3 | exon57 | SaCas9KKH | + | AACTGCTGGAAAGTCGCCTCCA | ATAGGT |
| 2387 | E57SaCas9KKH4 | exon57 | SaCas9KKH | + | GCCTCCAATAGGTGCCTGCCGG | CTTAAT |
| 2388 | E57SaCas9KKH5 | exon57 | SaCas9KKH | + | ATCTTTCAGCTGTAGCCACACC | AGAAGT |
| 2389 | E57SaCas9KKH6 | exon57 | SaCas9KKH | + | CACACCAGAAGTTCCTGCAGAG | AAAGGT |
| 2390 | E57SaCas9KKH7 | exon57 | SaCas9KKH | + | AGAGAAAGGTGCAGACGCTTCC | ACTGGT |
| 2391 | E57SaCas9KKH8 | exon57 | SaCas9KKH | + | TTCCACTGGTCAGAACTGGCTT | CCAAAT |
| 2392 | E57SaCas9KKH9 | exon57 | SaCas9KKH | − | TTCAGAAGCAGAACGATGTACA | TAGGGT |
| 2393 | E57SaCas9KKH10 | exon57 | SaCas9KKH | − | CTTTCCAGCAGTTCAGAAGCAG | AACGAT |
| 2394 | E57SaCas9KKH11 | exon57 | SaCas9KKH | − | CACCTATTGGAGGCGACTTTCC | AGCAGT |
| 2395 | E57SaCas9KKH12 | exon57 | SaCas9KKH | − | GTGTGGCTACAGCTGAAAGATG | ATGAAT |
| 2396 | E57SaCas9KKH13 | exon57 | SaCas9KKH | − | TCTGGTGTGGCTACAGCTGAAA | GATGAT |
| 2397 | E57SaCas9KKH14 | exon57 | SaCas9KKH | − | ACTTCTGGTGTGGCTACAGCTG | AAAGAT |
| 2398 | E57SaCas9KKH15 | exon57 | SaCas9KKH | − | TGCACCTTTCTCTGCAGGAACT | TCTGGT |
| 2399 | E57SaCas9KKH16 | exon57 | SaCas9KKH | − | TCCCATTTGGAAGCCAGTTCTG | ACCAGT |
| 2400 | E57SaCas9KKH17 | exon57 | SaCas9KKH | − | CTTTTTCAGGTCCCATTTGGAA | GCCAGT |
| 2401 | E58SaCas9KKH2 | exon58 | SaCas9KKH | + | CACATTCAATTACCTCTGGGCT | CCTGGT |
| 2402 | E58SaCas9KKH3 | exon58 | SaCas9KKH | + | TCAATTACCTCTGGGCTCCTGG | TAGAGT |
| 2403 | E58SaCas9KKH4 | exon58 | SaCas9KKH | + | TCTGGGCTCCTGGTAGAGTTTC | TCTAGT |
| 2404 | E58SaCas9KKH5 | exon58 | SaCas9KKH | + | TCCTTCCAAAGGCTGCTCTGTC | AGAAAT |
| 2405 | E58SaCas9KKH6 | exon58 | SaCas9KKH | + | GCTGCTCTGTCAGAAATATTCG | TACAGT |
| 2406 | E58SaCas9KKH7 | exon58 | SaCas9KKH | + | TCAGAAATATTCGTACAGTCTC | AAGAGT |
| 2407 | E58SaCas9KKH8 | exon58 | SaCas9KKH | + | TTCGTACAGTCTCAAGAGTACT | CATGAT |
| 2408 | E58SaCas9KKH9 | exon58 | SaCas9KKH | + | AGTCTCAAGAGTACTCATGATT | ACAGGT |
| 2409 | E58SaCas9KKH10 | exon58 | SaCas9KKH | + | GAGTACTCATGATTACAGGTTC | TTTAGT |
| 2410 | E58SaCas9KKH11 | exon58 | SaCas9KKH | + | CATGATTACAGGTTCTTTAGTT | TTCAAT |
| 2411 | E58SaCas9KKH17 | exon58 | SaCas9KKH | − | GAAACTCTACCAGGAGCCCAGA | GGTAAT |
| 2412 | E58SaCas9KKH18 | exon58 | SaCas9KKH | − | AGAGAAACTCTACCAGGAGCCC | AGAGGT |
| 2413 | E58SaCas9KKH19 | exon58 | SaCas9KKH | − | TCATGAGTACTCTTGAGACTGT | ACGAAT |
| 2414 | E58SaCas9KKH20 | exon58 | SaCas9KKH | − | GAAAACTAAAGAACCTGTAATC | ATGAGT |
| 2415 | E58SaCas9KKH21 | exon58 | SaCas9KKH | − | GGGAATTGAAAACTAAAGAACC | TGTAAT |
| 2416 | E58SaCas9KKH22 | exon58 | SaCas9KKH | − | CTCATTTCACAGGCCTTCAAGA | GGGAAT |
| 2417 | E59SaCas9KKH2 | exon59 | SaCas9KKH | + | GTAGACGGTACCTTGACTTTCT | CGAGGT |
| 2418 | E59SaCas9KKH3 | exon59 | SaCas9KKH | + | GACGGTACCTTGACTTTCTCGA | GGTGAT |
| 2419 | E59SaCas9KKH4 | exon59 | SaCas9KKH | + | ACTTTCTCGAGGTGATCTTGGA | GAGAGT |
| 2420 | E59SaCas9KKH5 | exon59 | SaCas9KKH | + | TCTCGAGGTGATCTTGGAGAGA | GTCAAT |
| 2421 | E59SaCas9KKH6 | exon59 | SaCas9KKH | + | TGATCTTGGAGAGAGTCAATGA | GGAGAT |
| 2422 | E59SaCas9KKH7 | exon59 | SaCas9KKH | + | GAGGAGATCGCCCACGGGCTGC | CAGGAT |
| 2423 | E59SaCas9KKH8 | exon59 | SaCas9KKH | + | CGCCCACGGGCTGCCAGGATCC | CTTGAT |
| 2424 | E59SaCas9KKH9 | exon59 | SaCas9KKH | + | ATCACCTCAGCTTGGCGCAGCT | TGAGGT |
| 2425 | E59SaCas9KKH10 | exon59 | SaCas9KKH | + | GTCCAGCTCATCCGTGGCCTCT | TGAAGT |
| 2426 | E59SaCas9KKH11 | exon59 | SaCas9KKH | + | ATCCGTGGCCTCTTGAAGTTCC | CGGAGT |
| 2427 | E59SaCas9KKH12 | exon59 | SaCas9KKH | + | CTTGAAGTTCCCGGAGTCTTTC | AAGGGT |
| 2428 | E59SaCas9KKH13 | exon59 | SaCas9KKH | + | AGGGTCTCATCTATTTTTCTCT | GCCAGT |
| 2429 | E59SaCas9KKH14 | exon59 | SaCas9KKH | + | TCTATTTTTCTCTGCCAGTCAG | CGGAGT |
| 2430 | E59SaCas9KKH15 | exon59 | SaCas9KKH | + | TTTCTCTGCCAGTCAGCGGAGT | GCAGGT |
| 2431 | E59SaCas9KKH16 | exon59 | SaCas9KKH | + | CTGCCAGTCAGCGGAGTGCAGG | TTCAAT |
| 2432 | E59SaCas9KKH17 | exon59 | SaCas9KKH | + | AGTGCAGGTTCAATTTTTCCCA | CTCAGT |
| 2433 | E59SaCas9KKH18 | exon59 | SaCas9KKH | + | CCTCAGCCTGCTTTCGTAGAAG | CCGAGT |
| 2434 | E59SaCas9KKH19 | exon59 | SaCas9KKH | + | GCTCTCTCCTCAGGAGGCAGCT | CTAAAT |
| 2435 | E59SaCas9KKH22 | exon59 | SaCas9KKH | − | TCCAAGATCACCTCGAGAAAGT | CAAGGT |
| 2436 | E59SaCas9KKH23 | exon59 | SaCas9KKH | − | ACTCTCTCCAAGATCACCTCGA | GAAAGT |
| 2437 | E59SaCas9KKH24 | exon59 | SaCas9KKH | − | CGATCTCCTCATTGACTCTCTC | CAAGAT |
| 2438 | E59SaCas9KKH25 | exon59 | SaCas9KKH | − | CAAGGGATCCTGGCAGCCCGTG | GGCGAT |
| 2439 | E59SaCas9KKH26 | exon59 | SaCas9KKH | − | CTGCGCCAAGCTGAGGTGATCA | AGGGAT |
| 2440 | E59SaCas9KKH27 | exon59 | SaCas9KKH | − | ACCTCAAGCTGCGCCAAGCTGA | GGTGAT |
| 2441 | E59SaCas9KKH28 | exon59 | SaCas9KKH | − | TGGACCTCAAGCTGCGCCAAGC | TGAGGT |
| 2442 | E59SaCas9KKH29 | exon59 | SaCas9KKH | − | ACTCCGGGAACTTCAAGAGGCC | ACGGAT |
| 2443 | E59SaCas9KKH30 | exon59 | SaCas9KKH | − | CTCCGCTGACTGGCAGAGAAAA | ATAGAT |
| 2444 | E59SaCas9KKH31 | exon59 | SaCas9KKH | − | TGCACTCCGCTGACTGGCAGAG | AAAAAT |
| 2445 | E59SaCas9KKH32 | exon59 | SaCas9KKH | − | GAGGAGGTCAATACTGAGTGGG | AAAAAT |
| 2446 | E59SaCas9KKH33 | exon59 | SaCas9KKH | − | AAGCAGGCTGAGGAGGTCAATA | CTGAGT |
| 2447 | E59SaCas9KKH34 | exon59 | SaCas9KKH | − | TCTACGAAAGCAGGCTGAGGAG | GTCAAT |
| 2448 | E59SaCas9KKH35 | exon59 | SaCas9KKH | − | GGCTTCTACGAAAGCAGGCTGA | GGAGGT |
| 2449 | E59SaCas9KKH36 | exon59 | SaCas9KKH | − | GCTGCCTCCTGAGGAGAGAGCC | CAGAAT |
| 2450 | E60SaCas9KKH1 | exon60 | SaCas9KKH | + | TGCTTACCTGCAGAAGCTTCCA | TCTGGT |
| 2451 | E60SaCas9KKH2 | exon60 | SaCas9KKH | + | TGCAGAAGCTTCCATCTGGTGT | TCAGGT |
| 2452 | E60SaCas9KKH3 | exon60 | SaCas9KKH | + | TCCATCTGGTGTTCAGGTCTTC | CAGAGT |
| 2453 | E60SaCas9KKH4 | exon60 | SaCas9KKH | + | GTGTTCAGGTCTTCCAGAGTGC | TGAGGT |
| 2454 | E60SaCas9KKH5 | exon60 | SaCas9KKH | + | GTCTTCCAGAGTGCTGAGGTTA | TACGGT |
| 2455 | E60SaCas9KKH6 | exon60 | SaCas9KKH | + | TGCTGAGGTTATACGGTGAGAG | CTGAAT |
| 2456 | E60SaCas9KKH7 | exon60 | SaCas9KKH | + | TATACGGTGAGAGCTGAATGCC | CAAAGT |
| 2457 | E60SaCas9KKH8 | exon60 | SaCas9KKH | + | ACGGTGAGAGCTGAATGCCCAA | AGTGGT |
| 2458 | E60SaCas9KKH9 | exon60 | SaCas9KKH | + | CCCAAAGTGGTAAGCTGGCGAG | CAAGGT |
| 2459 | E60SaCas9KKH10 | exon60 | SaCas9KKH | + | GGCTCACGTTCTCTTTCAGAGG | CGCAAT |
| 2460 | E60SaCas9KKH11 | exon60 | SaCas9KKH | + | TTTCAGAGGCGCAATTTCTCCT | CGAAGT |
| 2461 | E60SaCas9KKH15 | exon60 | SaCas9KKH | − | TGAACACCAGATGGAAGCTTCT | GCAGGT |
| 2462 | E60SaCas9KKH16 | exon60 | SaCas9KKH | − | AGCACTCTGGAAGACCTGAACA | CCAGAT |
| 2463 | E60SaCas9KKH17 | exon60 | SaCas9KKH | − | TCTGAAAGAGAACGTGAGCCAC | GTCAAT |
| 2464 | E60SaCas9KKH18 | exon60 | SaCas9KKH | − | ATTGCACACAGGCACTTCGAGG | AGAAAT |
| 2465 | E61SaCas9KKH1 | exon61 | SaCas9KKH | + | GCTGAAAATGACTTACTGGAAA | GAAAGT |
| 2466 | E61SaCas9KKH2 | exon61 | SaCas9KKH | + | TGACTTACTGGAAAGAAAGTGC | TGAGAT |
| 2467 | E61SaCas9KKH3 | exon61 | SaCas9KKH | + | AGAAAGTGCTGAGATGCTGGAC | CAAAGT |
| 2468 | E61SaCas9KKH4 | exon61 | SaCas9KKH | + | TGGGCTTCATGCAGCTGCCTGA | CTCGGT |
| 2469 | E61SaCas9KKH7 | exon61 | SaCas9KKH | − | GCATCTCAGCACTTTCTTTCCA | GTAAGT |
| 2470 | E61SaCas9KKH8 | exon61 | SaCas9KKH | − | TCCAGCATCTCAGCACTTTCTT | TCCAGT |
| 2471 | E61SaCas9KKH9 | exon61 | SaCas9KKH | − | GCTGCATGAAGCCCACAGGGAC | TTTGGT |
| 2472 | E61SaCas9KKH10 | exon61 | SaCas9KKH | − | CCTCCCAGGTGGCCGTCGAGGA | CCGAGT |
| 2473 | E62SaCas9KKH2 | exon62 | SaCas9KKH | + | GTGATACTTCCAACTTACTTGA | TATAGT |
| 2474 | E62SaCas9KKH3 | exon62 | SaCas9KKH | + | TATAGTAGGGCACTTTGTTTGG | CGAGAT |
| 2475 | E62SaCas9KKH5 | exon62 | SaCas9KKH | − | ACAAAGTGCCCTACTATATCAA | GTAAGT |
| 2476 | E62SaCas9KKH6 | exon62 | SaCas9KKH | − | CCAAACAAAGTGCCCTACTATA | TCAAGT |
| 2477 | E62SaCas9KKH7 | exon62 | SaCas9KKH | − | GGGAGAGAGCCATCTCGCCAAA | CAAAGT |
| 2478 | E62SaCas9KKH8 | exon62 | SaCas9KKH | − | TCCCTTCTTTTCAGCGTCTGTC | CAGGGT |
| 2479 | E63SaCas9KKH1 | exon63 | SaCas9KKH | + | ATGGCCATGTCCTTACCTAAAG | ACTGGT |
| 2480 | E63SaCas9KKH2 | exon63 | SaCas9KKH | + | GACTGGTAGAGCTCTGTCATTT | TGGGAT |
| 2481 | E63SaCas9KKH3 | exon63 | SaCas9KKH | + | TGGTAGAGCTCTGTCATTTTGG | GATGGT |
| 2482 | E63SaCas9KKH4 | exon63 | SaCas9KKH | + | CTGTCATTTTGGGATGGTCCCA | GCAAGT |
| 2483 | E63SaCas9KKH5 | exon63 | SaCas9KKH | + | TGGGATGGTCCCAGCAAGTTGT | TTGAGT |
| 2484 | E63SaCas9KKH7 | exon63 | SaCas9KKH | − | AATGACAGAGCTCTACCAGTCT | TTAGGT |
| 2485 | E63SaCas9KKH8 | exon63 | SaCas9KKH | − | CATCCCAAAATGACAGAGCTCT | ACCAGT |
| 2486 | E63SaCas9KKH9 | exon63 | SaCas9KKH | − | AAACAACTTGCTGGGACCATCC | CAAAAT |
| 2487 | E64SaCas9KKH1 | exon64 | SaCas9KKH | + | ATACTTACAGCAAAGGGCCTTC | TGCAGT |
| 2488 | E64SaCas9KKH2 | exon64 | SaCas9KKH | + | GCAAAGGGCCTTCTGCAGTCTT | CGGAGT |
| 2489 | E64SaCas9KKH3 | exon64 | SaCas9KKH | + | TCTGCAGTCTTCGGAGTTTCAT | GGCAGT |
| 2490 | E64SaCas9KKH4 | exon64 | SaCas9KKH | + | TTTCATGGCAGTCCTATAAGCT | GAGAAT |
| 2491 | E64SaCas9KKH5 | exon64 | SaCas9KKH | + | TAAGCTGAGAATCTGACATTAT | TCAGGT |
| 2492 | E64SaCas9KKH9 | exon64 | SaCas9KKH | − | AGACTGCAGAAGGCCCTTTGCT | GTAAGT |
| 2493 | E64SaCas9KKH10 | exon64 | SaCas9KKH | − | TTTTCAGCTGACCTGAATAATG | TCAGAT |
| 2494 | E64SaCas9KKH11 | exon64 | SaCas9KKH | − | TTCCCTCTTTTCAGCTGACCTG | AATAAT |
| 2495 | E64SaCas9KKH12 | exon64 | SaCas9KKH | − | GTTTTCCCTCTTTTCAGCTGAC | CTGAAT |
| 2496 | E65SaCas9KKH1 | exon65 | SaCas9KKH | + | TACGTATCATAAACATTCAGCA | GCCAGT |
| 2497 | E65SaCas9KKH2 | exon65 | SaCas9KKH | + | TCCACGCAGAGAGGGACGTTGA | CCAAAT |
| 2498 | E65SaCas9KKH3 | exon65 | SaCas9KKH | + | AAATTGTTGTGCTCTTGCTCCA | GGCGGT |
| 2499 | E65SaCas9KKH4 | exon65 | SaCas9KKH | + | TGTGCTCTTGCTCCAGGCGGTC | ATAAAT |
| 2500 | E65SaCas9KKH5 | exon65 | SaCas9KKH | + | GCTCTTGCTCCAGGCGGTCATA | AATAGT |
| 2501 | E65SaCas9KKH6 | exon65 | SaCas9KKH | + | CTTGCTCCAGGCGGTCATAAAT | AGTGGT |
| 2502 | E65SaCas9KKH7 | exon65 | SaCas9KKH | + | AGGCGGTCATAAATAGTGGTCA | AACAAT |
| 2503 | E65SaCas9KKH8 | exon65 | SaCas9KKH | + | GGTCATAAATAGTGGTCAAACA | ATTAAT |
| 2504 | E65SaCas9KKH9 | exon65 | SaCas9KKH | + | CATAAATAGTGGTCAAACAATT | AATAAT |
| 2505 | E65SaCas9KKH10 | exon65 | SaCas9KKH | + | TGGTCAAACAATTAATAATCTG | CAGGAT |
| 2506 | E65SaCas9KKH11 | exon65 | SaCas9KKH | + | ATAATCTGCAGGATATCCATGG | GCTGGT |
| 2507 | E65SaCas9KKH12 | exon65 | SaCas9KKH | + | TCCATGGGCTGGTCATTTTGCT | TGAGGT |
| 2508 | E65SaCas9KKH13 | exon65 | SaCas9KKH | + | TGGTCATTTTGCTTGAGGTTGT | GCTGGT |
| 2509 | E65SaCas9KKH14 | exon65 | SaCas9KKH | + | TCACATGCAGCTGACAGGCTCA | AGAGAT |
| 2510 | E65SaCas9KKH18 | exon65 | SaCas9KKH | − | TCTGAACTGGCTGCTGAATGTT | TATGAT |
| 2511 | E65SaCas9KKH19 | exon65 | SaCas9KKH | − | GGATATGTGTCTGAACTGGCTG | CTGAAT |
| 2512 | E65SaCas9KKH20 | exon65 | SaCas9KKH | − | TTTGGTCAACGTCCCTCTCTGC | GTGGAT |
| 2513 | E65SaCas9KKH21 | exon65 | SaCas9KKH | − | GCCTGGAGCAAGAGCACAACAA | TTTGGT |
| 2514 | E65SaCas9KKH22 | exon65 | SaCas9KKH | − | TGACCGCCTGGAGCAAGAGCAC | AACAAT |
| 2515 | E65SaCas9KKH23 | exon65 | SaCas9KKH | − | GCCCATGGATATCCTGCAGATT | ATTAAT |
| 2516 | E65SaCas9KKH24 | exon65 | SaCas9KKH | − | ATGACCAGCCCATGGATATCCT | GCAGAT |
| 2517 | E65SaCas9KKH25 | exon65 | SaCas9KKH | − | CCTCAAGCAAAATGACCAGCCC | ATGGAT |
| 2518 | E65SaCas9KKH26 | exon65 | SaCas9KKH | − | CTTGGACCAGCACAACCTCAAG | CAAAAT |
| 2519 | E65SaCas9KKH27 | exon65 | SaCas9KKH | − | TCTCTTGAGCCTGTCAGCTGCA | TGTGAT |
| 2520 | E66SaCas9KKH1 | exon66 | SaCas9KKH | + | GACTTACATCTGTACTTGTCTT | CCAAAT |
| 2521 | E66SaCas9KKH2 | exon66 | SaCas9KKH | + | CTTCCAAATGTGCTTTACACAG | GGAAAT |
| 2522 | E66SaCas9KKH3 | exon66 | SaCas9KKH | + | CCAAATGTGCTTTACACAGGGA | AATGAT |
| 2523 | E66SaCas9KKH4 | exon66 | SaCas9KKH | + | GTGCTTTACACAGGGAAATGAT | GCCAGT |
| 2524 | E66SaCas9KKH5 | exon66 | SaCas9KKH | + | TGCCAGTTTTAAAAGACAGGAC | ACGGAT |
| 2525 | E66SaCas9KKH9 | exon66 | SaCas9KKH | − | CATTTGGAAGACAAGTACAGAT | GTAAGT |
| 2526 | E66SaCas9KKH10 | exon66 | SaCas9KKH | − | AAAGCACATTTGGAAGACAAGT | ACAGAT |
| 2527 | E66SaCas9KKH11 | exon66 | SaCas9KKH | − | CTGTGTAAAGCACATTTGGAAG | ACAAGT |
| 2528 | E66SaCas9KKH12 | exon66 | SaCas9KKH | − | TTCATAATAGGGGACGAACAGG | GAGGAT |
| 2529 | E67SaCas9KKH2 | exon67 | SaCas9KKH | + | GGAAGCAGCTCCGGACACTTGG | CTCAAT |
| 2530 | E67SaCas9KKH3 | exon67 | SaCas9KKH | + | TGGCTCAATGTTACTGCCCCCA | AAGGAT |
| 2531 | E67SaCas9KKH4 | exon67 | SaCas9KKH | + | ATGCAACTTCACCCAACTGTCT | TGGAAT |
| 2532 | E67SaCas9KKH5 | exon67 | SaCas9KKH | + | CTTCACCCAACTGTCTTGGAAT | TTGGAT |
| 2533 | E67SaCas9KKH6 | exon67 | SaCas9KKH | + | CCCAACTGTCTTGGAATTTGGA | TAGAAT |
| 2534 | E67SaCas9KKH7 | exon67 | SaCas9KKH | + | TGCAGAAGGAGGCCCAGCCTGC | GCTGGT |
| 2535 | E67SaCas9KKH8 | exon67 | SaCas9KKH | + | GAGGCCCAGCCTGCGCTGGTCA | CAAAAT |
| 2536 | E67SaCas9KKH9 | exon67 | SaCas9KKH | + | GTTGAACTTGCCACTTGCTTGA | AAAGGT |
| 2537 | E67SaCas9KKH13 | exon67 | SaCas9KKH | − | TGTCCGGAGCTGCTTCCAATTT | GTAAGT |
| 2538 | E67SaCas9KKH14 | exon67 | SaCas9KKH | − | GAGCCAAGTGTCCGGAGCTGCT | TCCAAT |
| 2539 | E67SaCas9KKH15 | exon67 | SaCas9KKH | − | CTTTGGGGGCAGTAACATTGAG | CCAAGT |
| 2540 | E67SaCas9KKH16 | exon67 | SaCas9KKH | − | GGGTGAAGTTGCATCCTTTGGG | GGCAGT |
| 2541 | E67SaCas9KKH17 | exon67 | SaCas9KKH | − | TCCAAATTCCAAGACAGTTGGG | TGAAGT |
| 2542 | E67SaCas9KKH18 | exon67 | SaCas9KKH | − | TTCTATCCAAATTCCAAGACAG | TTGGGT |
| 2543 | E67SaCas9KKH19 | exon67 | SaCas9KKH | − | CATGATTCTATCCAAATTCCAA | GACAGT |
| 2544 | E67SaCas9KKH20 | exon67 | SaCas9KKH | − | GCCTCCTTCTGCATGATTCTAT | CCAAAT |
| 2545 | E67SaCas9KKH21 | exon67 | SaCas9KKH | − | GCGCAGGCTGGGCCTCCTTCTG | CATGAT |
| 2546 | E67SaCas9KKH22 | exon67 | SaCas9KKH | − | TTCAAGCAAGTGGCAAGTTCAA | CAGGAT |
| 2547 | E67SaCas9KKH23 | exon67 | SaCas9KKH | − | TGTAGACCTTTTCAAGCAAGTG | GCAAGT |
| 2548 | E67SaCas9KKH24 | exon67 | SaCas9KKH | − | CTTCCTTTGTAGACCTTTTCAA | GCAAGT |
| 2549 | E68SaCas9KKH3 | exon68 | SaCas9KKH | + | TTTTTGGTTCCTAATACCTGAA | TCCAAT |
| 2550 | E68SaCas9KKH4 | exon68 | SaCas9KKH | + | TTGGTTCCTAATACCTGAATCC | AATGAT |
| 2551 | E68SaCas9KKH5 | exon68 | SaCas9KKH | + | ATCCAATGATTGGACACTCTTT | GCAGAT |
| 2552 | E68SaCas9KKH6 | exon68 | SaCas9KKH | + | TCTTTGCAGATGTTACATTTGG | CCTGAT |
| 2553 | E68SaCas9KKH7 | exon68 | SaCas9KKH | + | TGTTACATTTGGCCTGATGCTT | GGCAGT |
| 2554 | E68SaCas9KKH8 | exon68 | SaCas9KKH | + | GACGGGCAGCCACACCATGGAC | TGGGGT |
| 2555 | E68SaCas9KKH9 | exon68 | SaCas9KKH | + | CAGCCACACCATGGACTGGGGT | TCCAGT |
| 2556 | E68SaCas9KKH10 | exon68 | SaCas9KKH | + | ATGGACTGGGGTTCCAGTCTCA | TCCAGT |
| 2557 | E68SaCas9KKH11 | exon68 | SaCas9KKH | + | TCCAGTCTAGGAAGAGGGCCGC | TTCGAT |
| 2558 | E68SaCas9KKH13 | exon68 | SaCas9KKH | − | AAAGAGTGTCCAATCATTGGAT | TCAGGT |
| 2559 | E68SaCas9KKH14 | exon68 | SaCas9KKH | − | ATCTGCAAAGAGTGTCCAATCA | TTGGAT |
| 2560 | E68SaCas9KKH15 | exon68 | SaCas9KKH | − | AATGTAACATCTGCAAAGAGTG | TCCAAT |
| 2561 | E68SaCas9KKH16 | exon68 | SaCas9KKH | − | CAGGCCAAATGTAACATCTGCA | AAGAGT |
| 2562 | E68SaCas9KKH17 | exon68 | SaCas9KKH | − | GCAGAAACTGCCAAGCATCAGG | CCAAAT |
| 2563 | E68SaCas9KKH18 | exon68 | SaCas9KKH | − | TGGTGTGGCTGCCCGTCCTGCA | CAGAGT |
| 2564 | E68SaCas9KKH19 | exon68 | SaCas9KKH | − | GGATGAGACTGGAACCCCAGTC | CATGGT |
| 2565 | E68SaCas9KKH20 | exon68 | SaCas9KKH | − | CTAGACTGGATGAGACTGGAAC | CCCAGT |
| 2566 | E68SaCas9KKH21 | exon68 | SaCas9KKH | − | TCGAAGCGGCCCTCTTCCTAGA | CTGGAT |
| 2567 | E68SaCas9KKH22 | exon68 | SaCas9KKH | − | CTTTGCAGGCTAATAATAAGCC | AGAGAT |
| 2568 | E69SaCas9KKH2 | exon69 | SaCas9KKH | + | GCTGGCGTCAAACTTACCGGAG | TGCAAT |
| 2569 | E69SaCas9KKH3 | exon69 | SaCas9KKH | + | ACCGGAGTGCAATATTCCACCA | TGGGAT |
| 2570 | E69SaCas9KKH4 | exon69 | SaCas9KKH | + | GGAGTGCAATATTCCACCATGG | GATAGT |
| 2571 | E69SaCas9KKH5 | exon69 | SaCas9KKH | + | GACCAGAAAAAAAGCAGCTTTG | GCAGAT |
| 2572 | E69SaCas9KKH6 | exon69 | SaCas9KKH | + | AAAAAGCAGCTTTGGCAGATGT | CATAAT |
| 2573 | E69SaCas9KKH7 | exon69 | SaCas9KKH | + | CAGCTTTGGCAGATGTCATAAT | TAAAGT |
| 2574 | E69SaCas9KKH8 | exon69 | SaCas9KKH | + | TAAAGTGCTTTAGACTCCTGTA | CCTGAT |
| 2575 | E69SaCas9KKH10 | exon69 | SaCas9KKH | − | CATGGTGGAATATTGCACTCCG | GTAAGT |
| 2576 | E69SaCas9KKH11 | exon69 | SaCas9KKH | − | ATCCCATGGTGGAATATTGCAC | TCCGGT |
| 2577 | E69SaCas9KKH12 | exon69 | SaCas9KKH | − | CATAAAATGCACTATCCCATGG | TGGAAT |
| 2578 | E69SaCas9KKH13 | exon69 | SaCas9KKH | − | AAGGCCATAAAATGCACTATCC | CATGGT |
| 2579 | E69SaCas9KKH14 | exon69 | SaCas9KKH | − | CTGGTCGAGTTGCAAAAGGCCA | TAAAAT |
| 2580 | E69SaCas9KKH15 | exon69 | SaCas9KKH | − | GCCAAAGCTGCTTTTTTTCTGG | TCGAGT |
| 2581 | E69SaCas9KKH16 | exon69 | SaCas9KKH | | CATCTGCCAAAGCTGCTTTTTT | TCTGGT |
| 2582 | E69SaCas9KKH17 | exon69 | SaCas9KKH | − | CAGGTACAGGAGTCTAAAGCAC | TTTAAT |
| 2583 | E69SaCas9KKH18 | exon69 | SaCas9KKH | − | GTTTTTGCTCTTTATCAGGTAC | AGGAGT |
| 2584 | E70SaCas9KKH1 | exon70 | SaCas9KKH | + | TTTCCATGTTGTCCCCCTCTAA | GACAGT |
| 2585 | E70SaCas9KKH2 | exon70 | SaCas9KKH | + | CCCTCTAAGACAGTCTGCACTG | GCAGGT |
| 2586 | E70SaCas9KKH3 | exon70 | SaCas9KKH | + | TGCACTGGCAGGTAGCCCATTC | GGGGAT |
| 2587 | E70SaCas9KKH4 | exon70 | SaCas9KKH | + | TAGCCCATTCGGGGATGCTTCG | CAAAAT |
| 2588 | E70SaCas9KKH5 | exon70 | SaCas9KKH | + | GGGGATGCTTCGCAAAATACCT | TTTGGT |
| 2589 | E70SaCas9KKH6 | exon70 | SaCas9KKH | + | CTTCGCAAAATACCTTTTGGTT | CGAAAT |
| 2590 | E70SaCas9KKH7 | exon70 | SaCas9KKH | + | CCTTTTGGTTCGAAATTTGTTT | TTTAGT |
| 2591 | E70SaCas9KKH8 | exon70 | SaCas9KKH | + | AATTTGTTTTTTAGTACCTTGG | CAAAGT |
| 2592 | E70SaCas9KKH9 | exon70 | SaCas9KKH | + | GGCAAAGTCTCGAACATCTTCT | CCTGAT |
| 2593 | E70SaCas9KKH10 | exon70 | SaCas9KKH | + | AGTCTCGAACATCTTCTCCTGA | TGTAGT |
| 2594 | E70SaCas9KKH15 | exon70 | SaCas9KKH | − | AGGGGGACAACATGGAAACGTG | AGTAGT |
| 2595 | E70SaCas9KKH16 | exon70 | SaCas9KKH | − | TAGAGGGGGACAACATGGAAAC | GTGAGT |
| 2596 | E70SaCas9KKH17 | exon70 | SaCas9KKH | − | AGCATCCCCGAATGGGCTACCT | GCCAGT |
| 2597 | E70SaCas9KKH18 | exon70 | SaCas9KKH | − | AAAGGTATTTTGCGAAGCATCC | CCGAAT |
| 2598 | E70SaCas9KKH19 | exon70 | SaCas9KKH | − | CTAAAAAACAAATTTCGAACCA | AAAGGT |
| 2599 | E70SaCas9KKH20 | exon70 | SaCas9KKH | − | GACTTTGCCAAGGTACTAAAAA | ACAAAT |
| 2600 | E70SaCas9KKH21 | exon70 | SaCas9KKH | − | GAGAAGATGTTCGAGACTTTGC | CAAGGT |
| 2601 | E70SaCas9KKH22 | exon70 | SaCas9KKH | − | TCCCTTTTAGACTACATCAGGA | GAAGAT |
| 2602 | E71SaCas9KKH2 | exon71 | SaCas9KKH | + | ACTCACGCAGAATCTACTGGCC | AGAAGT |
| 2603 | E71SaCas9KKH3 | exon71 | SaCas9KKH | + | ACGCAGAATCTACTGGCCAGAA | GTTGAT |
| 2604 | E71SaCas9KKH4 | exon71 | SaCas9KKH | + | AATCTACTGGCCAGAAGTTGAT | CAGAGT |
| 2605 | E71SaCas9KKH9 | exon71 | SaCas9KKH | − | ACTTCTGGCCAGTAGATTCTGC | GTGAGT |
| 2606 | E71SaCas9KKH10 | exon71 | SaCas9KKH | − | TACTCTGATCAACTTCTGGCCA | GTAGAT |
| 2607 | E71SaCas9KKH11 | exon71 | SaCas9KKH | − | CCGTTACTCTGATCAACTTCTG | GCCAGT |
| 2608 | E71SaCas9KKH12 | exon71 | SaCas9KKH | − | TTTTGTTTTGCAGTCCCGTTAC | TCTGAT |
| 2609 | E72SaCas9KKH1 | exon72 | SaCas9KKH | + | CAACTAGTCTCATACCTGCTAG | CATAAT |
| 2610 | E72SaCas9KKH2 | exon72 | SaCas9KKH | + | TCTCATACCTGCTAGCATAATG | TTCAAT |
| 2611 | E72SaCas9KKH3 | exon72 | SaCas9KKH | + | CTGCTAGCATAATGTTCAATGC | GTGAAT |
| 2612 | E72SaCas9KKH4 | exon72 | SaCas9KKH | + | TAGCATAATGTTCAATGCGTGA | ATGAGT |
| 2613 | E72SaCas9KKH11 | exon72 | SaCas9KKH | − | TCACGCATTGAACATTATGCTA | GCAGGT |
| 2614 | E72SaCas9KKH12 | exon72 | SaCas9KKH | − | CTCGTCCCCTCAGCTTTCACAC | GATGAT |
| 2615 | E72SaCas9KKH13 | exon72 | SaCas9KKH | − | TGCCTCGTCCCCTCAGCTTTCA | CACGAT |
| 2616 | E73SaCas9KKH1 | exon73 | SaCas9KKH | + | ATACTTACATGCTCTCATTAGG | AGAGAT |
| 2617 | E73SaCas9KKH2 | exon73 | SaCas9KKH | + | TCATTAGGAGAGATGCTATCAT | TTAGAT |
| 2618 | E73SaCas9KKH3 | exon73 | SaCas9KKH | + | AGGAGAGATGCTATCATTTAGA | TAAGAT |
| 2619 | E73SaCas9KKH4 | exon73 | SaCas9KKH | + | TGCTGTTTTCCATTTCTGCTAG | CCTGAT |
| 2620 | E73SaCas9KKH6 | exon73 | SaCas9KKH | − | GCATCTCTCCTAATGAGAGCAT | GTAAGT |
| 2621 | E73SaCas9KKH7 | exon73 | SaCas9KKH | − | TTATCTAAATGATAGCATCTCT | CCTAAT |
| 2622 | E73SaCas9KKH8 | exon73 | SaCas9KKH | − | AAACAGCAATGGATCTTATCTA | AATGAT |
| 2623 | E73SaCas9KKH9 | exon73 | SaCas9KKH | − | GGAAAACAGCAATGGATCTTAT | CTAAAT |
| 2624 | E73SaCas9KKH10 | exon73 | SaCas9KKH | − | CTAGCAGAAATGGAAAACAGCA | ATGGAT |
| 2625 | E73SaCas9KKH11 | exon73 | SaCas9KKH | − | CAGGCTAGCAGAAATGGAAAAC | AGCAAT |
| 2626 | E73SaCas9KKH12 | exon73 | SaCas9KKH | − | TTACGTTTTTTATCAGGCTAGC | AGAAAT |
| 2627 | E74SaCas9KKH1 | exon74 | SaCas9KKH | + | AAAACTCACCTGTTTTCTTCCT | CAAGAT |
| 2628 | E74SaCas9KKH2 | exon74 | SaCas9KKH | + | TGTTTTCTTCCTCAAGATCTGC | TAGGAT |
| 2629 | E74SaCas9KKH3 | exon74 | SaCas9KKH | + | CCCCTCTTTCCTCACTCTCTAA | GGAAAT |
| 2630 | E74SaCas9KKH4 | exon74 | SaCas9KKH | + | TTTCCTCACTCTCTAAGGAAAT | CAAGAT |
| 2631 | E74SaCas9KKH5 | exon74 | SaCas9KKH | + | GGACTACGAGGCTGGCTCAGGG | GGGAGT |
| 2632 | E74SaCas9KKH6 | exon74 | SaCas9KKH | + | CGAGGCTGGCTCAGGGGGGAGT | CCTGGT |
| 2633 | E74SaCas9KKH7 | exon74 | SaCas9KKH | + | GGGGAGTCCTGGTTCAAACTTT | GGCAGT |
| 2634 | E74SaCas9KKH8 | exon74 | SaCas9KKH | + | GAGTCCTGGTTCAAACTTTGGC | AGTAAT |
| 2635 | E74SaCas9KKH9 | exon74 | SaCas9KKH | + | GGTTCAAACTTTGGCAGTAATG | CTGGAT |
| 2636 | E74SaCas9KKH10 | exon74 | SaCas9KKH | + | CTTTGGCAGTAATGCTGGATTA | ACAAAT |
| 2637 | E74SaCas9KKH16 | exon74 | SaCas9KKH | − | CAGATCTTGAGGAAGAAAACAG | GTGAGT |
| 2638 | E74SaCas9KKH17 | exon74 | SaCas9KKH | − | CTAGCAGATCTTGAGGAAGAAA | ACAGGT |
| 2639 | E74SaCas9KKH18 | exon74 | SaCas9KKH | − | AGGGGAGCTAGAGAGAATCCTA | GCAGAT |
| 2640 | E74SaCas9KKH19 | exon74 | SaCas9KKH | − | GTGAGGAAAGAGGGGAGCTAGA | GAGAAT |
| 2641 | E74SaCas9KKH20 | exon74 | SaCas9KKH | − | TGCCCAGATCTTGATTTCCTTA | GAGAGT |
| 2642 | E74SaCas9KKH21 | exon74 | SaCas9KKH | − | AGCCTCGTAGTCCTGCCCAGAT | CTTGAT |
| 2643 | E74SaCas9KKH22 | exon74 | SaCas9KKH | − | TGAGCCAGCCTCGTAGTCCTGC | CCAGAT |
| 2644 | E74SaCas9KKH23 | exon74 | SaCas9KKH | − | GGACTCCCCCCTGAGCCAGCCT | CGTAGT |
| 2645 | E74SaCas9KKH24 | exon74 | SaCas9KKH | − | TTTGTTAATCCAGCATTACTGC | CAAAGT |
| 2646 | E74SaCas9KKH25 | exon74 | SaCas9KKH | − | TTTCCAGAGATGATGAACATTT | GTTAAT |
| 2647 | E75SaCas9KKH1 | exon75 | SaCas9KKH | + | AACTGTGACTCCAGCTGTTTAT | TGTGGT |
| 2648 | E75SaCas9KKH2 | exon75 | SaCas9KKH | + | CCAGCTGTTTATTGTGGTCTTC | CAGGAT |
| 2649 | E75SaCas9KKH3 | exon75 | SaCas9KKH | + | TTCCAGGCGGCCTTTGTGTTGA | CGCAGT |
| 2650 | E75SaCas9KKH4 | exon75 | SaCas9KKH | + | GTTGACGCAGTAGCTTGGCCTC | AGCAAT |
| 2651 | E75SaCas9KKH5 | exon75 | SaCas9KKH | + | CAGCATCCCGGGGACTCTGGGG | AGAGGT |
| 2652 | E75SaCas9KKH6 | exon75 | SaCas9KKH | + | GGGCATCATTTCAGGAGGGGAC | GGCAGT |
| 2653 | E75SaCas9KKH7 | exon75 | SaCas9KKH | + | TTATGTTCGTGCTGCTGCTTTA | GACGGT |
| 2654 | E75SaCas9KKH8 | exon75 | SaCas9KKH | + | TTTAGACGGTCATATTCTGCTT | GCAGAT |
| 2655 | E75SaCas9KKH12 | exon75 | SaCas9KKH | − | ACAGGCTAAGGCAGCTGCTGGA | GCAAGT |
| 2656 | E75SaCas9KKH13 | exon75 | SaCas9KKH | − | GACCACAATAAACAGCTGGAGT | CACAGT |
| 2657 | E75SaCas9KKH14 | exon75 | SaCas9KKH | − | CTGGAAGACCACAATAAACAGC | TGGAGT |
| 2658 | E75SaCas9KKH15 | exon75 | SaCas9KKH | − | CAGGATGCAAATCCTGGAAGAC | CACAAT |
| 2659 | E75SaCas9KKH16 | exon75 | SaCas9KKH | − | AAGGCCGCCTGGAAGCCAGGAT | GCAAAT |
| 2660 | E75SaCas9KKH17 | exon75 | SaCas9KKH | − | AACACAAAGGCCGCCTGGAAGC | CAGGAT |
| 2661 | E75SaCas9KKH18 | exon75 | SaCas9KKH | − | GCCCACCTCTCCCCAGAGTCCC | CGGGAT |
| 2662 | E75SaCas9KKH19 | exon75 | SaCas9KKH | − | TGAAATGATGCCCACCTCTCCC | CAGAGT |
| 2663 | E75SaCas9KKH20 | exon75 | SaCas9KKH | − | CCCCACTGCCGTCCCCTCCTGA | AATGAT |
| 2664 | E75SaCas9KKH21 | exon75 | SaCas9KKH | − | TGTCCCCACTGCCGTCCCCTCC | TGAAAT |
| 2665 | E75SaCas9KKH22 | exon75 | SaCas9KKH | − | GATGCCAATAGGAATCTGCAAG | CAGAAT |
| 2666 | E76SaCas9KKH1 | exon76 | SaCas9KKH | + | GAGTAGCTAGGACACTTACCCA | TGGAGT |
| 2667 | E76SaCas9KKH2 | exon76 | SaCas9KKH | + | TAGGACACTTACCCATGGAGTC | CGAAGT |
| 2668 | E76SaCas9KKH3 | exon76 | SaCas9KKH | + | GACTGCTGTCGGACCTCTGTAG | AGAGGT |
| 2669 | E76SaCas9KKH4 | exon76 | SaCas9KKH | + | TCACTTTGGCCTCTGCCTGGGG | CTAAGT |
| 2670 | E76SaCas9KKH7 | exon76 | SaCas9KKH | − | AGTCAAACTTCGGACTCCATGG | GTAAGT |
| 2671 | E76SaCas9KKH8 | exon76 | SaCas9KKH | − | TGGCAGTCAAACTTCGGACTCC | ATGGGT |
| 2672 | E76SaCas9KKH9 | exon76 | SaCas9KKH | − | GCCTATGCTGCTCCGAGTGGTT | GGCAGT |
| 2673 | E76SaCas9KKH10 | exon76 | SaCas9KKH | − | GCAGTCAGCCTATGCTGCTCCG | AGTGGT |
| 2674 | E76SaCas9KKH11 | exon76 | SaCas9KKH | − | ACAGCAGTCAGCCTATGCTGCT | CCGAGT |
| 2675 | E76SaCas9KKH12 | exon76 | SaCas9KKH | − | TACCTCTCTACAGAGGTCCGAC | AGCAGT |
| 2676 | E76SaCas9KKH13 | exon76 | SaCas9KKH | − | TCCTCTCCTTCTACCTCTCTAC | AGAGGT |
| 2677 | E76SaCas9KKH14 | exon76 | SaCas9KKH | − | CAGAGGCCAAAGTGAATGGCAC | AACGGT |
| 2678 | E76SaCas9KKH15 | exon76 | SaCas9KKH | − | TTAGCCCCAGGCAGAGGCCAAA | GTGAAT |
| 2679 | E76SaCas9KKH16 | exon76 | SaCas9KKH | − | TGACTTAGCCCCAGGCAGAGGC | CAAAGT |
| 2680 | E77SaCas9KKH1 | exon77 | SaCas9KKH | + | AGCTTACCTCTTGAACTAGGGA | AGGAGT |
| 2681 | E77SaCas9KKH2 | exon77 | SaCas9KKH | + | TCTTGAACTAGGGAAGGAGTTG | TTGAGT |
| 2682 | E77SaCas9KKH3 | exon77 | SaCas9KKH | + | CTTGTGTCCTGGGGAGGACTGA | GAAGAT |
| 2683 | E77SaCas9KKH4 | exon77 | SaCas9KKH | + | GGACTGAGAAGATCTTCCTCAC | CTTAAT |
| 2684 | E77SaCas9KKH10 | exon77 | SaCas9KKH | − | CAACAACTCCTTCCCTAGTTCA | AGAGGT |
| 2685 | E77SaCas9KKH11 | exon77 | SaCas9KKH | − | GGAGCAACTCAACAACTCCTTC | CCTAGT |
| 2686 | E77SaCas9KKH12 | exon77 | SaCas9KKH | − | ACACAAGCACAGGGTTAGAGGA | GGTGAT |
| 2687 | E77SaCas9KKH13 | exon77 | SaCas9KKH | − | AGGACACAAGCACAGGGTTAGA | GGAGGT |
| 2688 | E77SaCas9KKH14 | exon77 | SaCas9KKH | − | AGTCCTCCCCAGGACACAAGCA | CAGGGT |
| 2689 | E77SaCas9KKH15 | exon77 | SaCas9KKH | − | TTATTAAGGTGAGGAAGATCTT | CTCAGT |
| 2690 | E77SaCas9KKH16 | exon77 | SaCas9KKH | − | TTTTTGCTTTTATTAAGGTGAG | GAAGAT |
| 2691 | E78SaCas9KKH1 | exon78 | SaCas9KKH | + | TAACCTCTCTCATTGGCTTTCC | AGGGGT |
| 2692 | E78SaCas9KKH2 | exon78 | SaCas9KKH | + | GCTTTCCAGGGGTATTTCTTCC | TTTAAT |
| 2693 | E78SaCas9KKH6 | exon78 | SaCas9KKH | − | CCCTGGAAAGCCAATGAGAGAG | GTTAGT |
| 2694 | E78SaCas9KKH7 | exon78 | SaCas9KKH | − | ATACCCCTGGAAAGCCAATGAG | AGAGGT |
| 2695 | E78SaCas9KKH8 | exon78 | SaCas9KKH | − | AAGGAAGAAATACCCCTGGAAA | GCCAAT |
| 2696 | E79SaCas9KKH1 | exon79 | SaCas9KKH | + | GTAACATAACTGCGTGCTTTAT | TGAGAT |
| 2697 | E79SaCas9KKH2 | exon79 | SaCas9KKH | + | AACTGCGTGCTTTATTGAGATA | CACAGT |
| 2698 | E79SaCas9KKH3 | exon79 | SaCas9KKH | + | GCTTTATTGAGATACACAGTAA | AGCAGT |
| 2699 | E79SaCas9KKH4 | exon79 | SaCas9KKH | + | GAGATACACAGTAAAGCAGTAC | TATAAT |
| 2700 | E79SaCas9KKH5 | exon79 | SaCas9KKH | + | ACACAGTAAAGCAGTACTATAA | TACAAT |
| 2701 | E79SaCas9KKH6 | exon79 | SaCas9KKH | + | CAGTAAAGCAGTACTATAATAC | AATAGT |
| 2702 | E79SaCas9KKH7 | exon79 | SaCas9KKH | + | TAATACAATAGTAAGGCATATA | TTTGGT |
| 2703 | E79SaCas9KKH8 | exon79 | SaCas9KKH | + | CAATAGTAAGGCATATATTTGG | TGAAGT |
| 2704 | E79SaCas9KKH9 | exon79 | SaCas9KKH | + | GTAAGGCATATATTTGGTGAAG | TCTGAT |
| 2705 | E79SaCas9KKH10 | exon79 | SaCas9KKH | + | TTGGTGAAGTCTGATATGTTGT | GAAAAT |
| 2706 | E79SaCas9KKH11 | exon79 | SaCas9KKH | + | GAAGTCTGATATGTTGTGAAAA | TGCAGT |
| 2707 | E79SaCas9KKH12 | exon79 | SaCas9KKH | + | TGTTGTGAAAATGCAGTAAAAC | TGAAGT |
| 2708 | E79SaCas9KKH13 | exon79 | SaCas9KKH | + | ATGCAGTAAAACTGAAGTTTAA | AAAAAT |
| 2709 | E79SaCas9KKH14 | exon79 | SaCas9KKH | + | CAGTAAAACTGAAGTTTAAAAA | AATAAT |
| 2710 | E79SaCas9KKH15 | exon79 | SaCas9KKH | + | CTGAAGTTTAAAAAAATAATTC | GTAAAT |
| 2711 | E79SaCas9KKH16 | exon79 | SaCas9KKH | + | TAAAAAAATAATTCGTAAATGT | TACAGT |
| 2712 | E79SaCas9KKH17 | exon79 | SaCas9KKH | + | AATAATTCGTAAATGTTACAGT | GTTGGT |
| 2713 | E79SaCas9KKH18 | exon79 | SaCas9KKH | + | TGTTACAGTGTTGGTGTTAAAA | CACAAT |
| 2714 | E79SaCas9KKH19 | exon79 | SaCas9KKH | + | TTGGTGTTAAAACACAATATAT | TATGAT |
| 2715 | E79SaCas9KKH20 | exon79 | SaCas9KKH | + | AAAACACAATATATTATGATAC | TCAAGT |
| 2716 | E79SaCas9KKH21 | exon79 | SaCas9KKH | + | TATTATGATACTCAAGTAAGAA | CTCAGT |
| 2717 | E79SaCas9KKH22 | exon79 | SaCas9KKH | + | AAGTAAGAACTCAGTACCTGAA | AACAAT |
| 2718 | E79SaCas9KKH23 | exon79 | SaCas9KKH | + | AAAACAATGACAAAACATGCCA | TGTGAT |
| 2719 | E79SaCas9KKH24 | exon79 | SaCas9KKH | + | ACATGCCATGTGATGTTTATGC | TTCAGT |
| 2720 | E79SaCas9KKH25 | exon79 | SaCas9KKH | + | GATGTTTATGCTTCAGTTACAT | TATGAT |
| 2721 | E79SaCas9KKH26 | exon79 | SaCas9KKH | + | ATGCTTCAGTTACATTATGATT | TACAGT |
| 2722 | E79SaCas9KKH27 | exon79 | SaCas9KKH | + | TCAGTTACATTATGATTTACAG | TTTAAT |
| 2723 | E79SaCas9KKH28 | exon79 | SaCas9KKH | + | CATTATGATTTACAGTTTAATA | CTTGGT |
| 2724 | E79SaCas9KKH29 | exon79 | SaCas9KKH | + | TATGATTTACAGTTTAATACTT | GGTGGT |
| 2725 | E79SaCas9KKH30 | exon79 | SaCas9KKH | + | GGTGGTTATAAAGAACACAACA | CGAAAT |
| 2726 | E79SaCas9KKH31 | exon79 | SaCas9KKH | + | GGTTATAAAGAACACAACACGA | AATAAT |
| 2727 | E79SaCas9KKH32 | exon79 | SaCas9KKH | + | AGAACACAACACGAAATAATGT | CCAAAT |
| 2728 | E79SaCas9KKH33 | exon79 | SaCas9KKH | + | CACAACACGAAATAATGTCCAA | ATTAAT |
| 2729 | E79SaCas9KKH34 | exon79 | SaCas9KKH | + | TAATGTCCAAATTAATTATGCT | TAAAAT |
| 2730 | E79SaCas9KKH35 | exon79 | SaCas9KKH | + | AAATTAATTATGCTTAAAATGC | AGCAAT |
| 2731 | E79SaCas9KKH36 | exon79 | SaCas9KKH | + | CTTAAAATGCAGCAATAAAGCT | CTCAAT |
| 2732 | E79SaCas9KKH37 | exon79 | SaCas9KKH | + | CAATAAAGCTCTCAATTTTTGT | TCAAAT |
| 2733 | E79SaCas9KKH38 | exon79 | SaCas9KKH | + | ATTATGACAGACTCACTCCAGA | GCTAAT |
| 2734 | E79SaCas9KKH39 | exon79 | SaCas9KKH | + | AATGTGTCTAAAAGAAAAACAA | AAAGAT |
| 2735 | E79SaCas9KKH40 | exon79 | SaCas9KKH | + | AAGAAAAACAAAAAGATTAAAA | CAAAAT |
| 2736 | E79SaCas9KKH41 | exon79 | SaCas9KKH | + | TTATTTATGCACTCTATTTACC | TCTGAT |
| 2737 | E79SaCas9KKH42 | exon79 | SaCas9KKH | + | GCACTCTATTTACCTCTGATTT | TAGAAT |
| 2738 | E79SaCas9KKH43 | exon79 | SaCas9KKH | + | TGAAACTTACTTACTTAAACTT | CTTAGT |
| 2739 | E79SaCas9KKH44 | exon79 | SaCas9KKH | + | CTTACTTACTTAAACTTCTTAG | TAGGAT |
| 2740 | E79SaCas9KKH45 | exon79 | SaCas9KKH | + | ACTTAAACTTCTTAGTAGGATG | TAAAGT |
| 2741 | E79SaCas9KKH46 | exon79 | SaCas9KKH | + | GGATGTAAAGTAACCCCTTGTT | TTAAAT |
| 2742 | E79SaCas9KKH47 | exon79 | SaCas9KKH | + | AAAGTAACCCCTTGTTTTAAAT | CTGAGT |
| 2743 | E79SaCas9KKH48 | exon79 | SaCas9KKH | + | CCTTGTTTTAAATCTGAGTTTT | AAAAAT |
| 2744 | E79SaCas9KKH49 | exon79 | SaCas9KKH | + | TAAATCTGAGTTTTAAAAATCC | TTGGGT |
| 2745 | E79SaCas9KKH50 | exon79 | SaCas9KKH | + | TTTAAAAATCCTTGGGTAAAGA | AAAGGT |
| 2746 | E79SaCas9KKH51 | exon79 | SaCas9KKH | + | GGTCCAGCGTCACATAAAGGAA | AAAAAT |
| 2747 | E79SaCas9KKH52 | exon79 | SaCas9KKH | + | GGAAAAAAATGCAAGACAAAAA | CCAAAT |
| 2748 | E79SaCas9KKH53 | exon79 | SaCas9KKH | + | CAAGACAAAAACCAAATCTTCA | TGTAAT |
| 2749 | E79SaCas9KKH54 | exon79 | SaCas9KKH | + | CAAAAACCAAATCTTCATGTAA | TTTGGT |
| 2750 | E79SaCas9KKH55 | exon79 | SaCas9KKH | + | AAACCAAATCTTCATGTAATTT | GGTAAT |
| 2751 | E79SaCas9KKH56 | exon79 | SaCas9KKH | + | GGTAATTTGTTACCTTAGAGCT | TTGGGT |
| 2752 | E79SaCas9KKH57 | exon79 | SaCas9KKH | + | TTAGAGCTTTGGGTTTTCTTTT | GAAAAT |
| 2753 | E79SaCas9KKH58 | exon79 | SaCas9KKH | + | TGAAAATTATGAAGGAAAAAGA | AAGAAT |
| 2754 | E79SaCas9KKH59 | exon79 | SaCas9KKH | + | AGAAAGAATTATAAAGGAAAAA | GAAAAT |
| 2755 | E79SaCas9KKH60 | exon79 | SaCas9KKH | + | TTATAAAGGAAAAAGAAAATAA | CGCAAT |
| 2756 | E79SaCas9KKH61 | exon79 | SaCas9KKH | + | GAAAAAGAAAATAACGCAATGG | ACAAGT |
| 2757 | E79SaCas9KKH62 | exon79 | SaCas9KKH | + | AAAGAAAATAACGCAATGGACA | AGTGGT |
| 2758 | E79SaCas9KKH63 | exon79 | SaCas9KKH | + | GACAAGTGGTGAAGCTGTGAAC | TCAGGT |
| 2759 | E79SaCas9KKH64 | exon79 | SaCas9KKH | + | TGAAGCTGTGAACTCAGGTGTG | CACAAT |
| 2760 | E79SaCas9KKH65 | exon79 | SaCas9KKH | + | ATTATCAGGAACACCCCAAAAC | CAAAGT |
| 2761 | E79SaCas9KKH66 | exon79 | SaCas9KKH | + | CAGGAACACCCCAAAACCAAAG | TGAGGT |
| 2762 | E79SaCas9KKH67 | exon79 | SaCas9KKH | + | CACCCCAAAACCAAAGTGAGGT | AGAAAT |
| 2763 | E79SaCas9KKH68 | exon79 | SaCas9KKH | + | AGAAATAGCATGAGAAGCCGTG | TTTGAT |
| 2764 | E79SaCas9KKH69 | exon79 | SaCas9KKH | + | AGCATGAGAAGCCGTGTTTGAT | GTTAAT |
| 2765 | E79SaCas9KKH70 | exon79 | SaCas9KKH | + | TGAGAAGCCGTGTTTGATGTTA | ATTAAT |
| 2766 | E79SaCas9KKH71 | exon79 | SaCas9KKH | + | AAGCCGTGTTTGATGTTAATTA | ATTAAT |
| 2767 | E79SaCas9KKH72 | exon79 | SaCas9KKH | + | GTTTGATGTTAATTAATTAATT | ATTAAT |
| 2768 | E79SaCas9KKH73 | exon79 | SaCas9KKH | + | TGATGTTAATTAATTAATTATT | AATAAT |
| 2769 | E79SaCas9KKH74 | exon79 | SaCas9KKH | + | GGACAAAACCCACTCTCCAAAA | GCTAAT |
| 2770 | E79SaCas9KKH75 | exon79 | SaCas9KKH | + | CACTCTCCAAAAGCTAATTACA | CTTGAT |
| 2771 | E79SaCas9KKH76 | exon79 | SaCas9KKH | + | GATGTCAGCCCACTCTCCAAAA | GCTAAT |
| 2772 | E79SaCas9KKH77 | exon79 | SaCas9KKH | + | CACTCTCCAAAAGCTAATTACA | CTTGAT |
| 2773 | E79SaCas9KKH78 | exon79 | SaCas9KKH | + | AAAGCTAATTACACTTGATGTC | AGAGGT |
| 2774 | E79SaCas9KKH79 | exon79 | SaCas9KKH | + | ATTACACTTGATGTCAGAGGTA | ACAGAT |
| 2775 | E79SaCas9KKH80 | exon79 | SaCas9KKH | + | GATGTCAGAGGTAACAGATTTG | CAAAAT |
| 2776 | E79SaCas9KKH81 | exon79 | SaCas9KKH | + | GAGGTAACAGATTTGCAAAATT | ATAGGT |
| 2777 | E79SaCas9KKH82 | exon79 | SaCas9KKH | + | AGATTTGCAAAATTATAGGTCA | CACGGT |
| 2778 | E79SaCas9KKH83 | exon79 | SaCas9KKH | + | TTTGCAAAATTATAGGTCACAC | GGTGGT |
| 2779 | E79SaCas9KKH84 | exon79 | SaCas9KKH | + | ATAGGTCACACGGTGGTATCTA | TTGAAT |
| 2780 | E79SaCas9KKH85 | exon79 | SaCas9KKH | + | GTCACACGGTGGTATCTATTGA | ATGAAT |
| 2781 | E79SaCas9KKH86 | exon79 | SaCas9KKH | + | ACACGGTGGTATCTATTGAATG | AATGAT |
| 2782 | E79SaCas9KKH87 | exon79 | SaCas9KKH | + | GTATCTATTGAATGAATGATTT | AAAAAT |
| 2783 | E79SaCas9KKH88 | exon79 | SaCas9KKH | + | ATGAATGATTTAAAAATCAAAA | AGAAAT |
| 2784 | E79SaCas9KKH89 | exon79 | SaCas9KKH | + | TGATTTAAAAATCAAAAAGAAA | TAAAAT |
| 2785 | E79SaCas9KKH90 | exon79 | SaCas9KKH | + | AAAAAGAAATAAAATGGCATGA | AAGAGT |
| 2786 | E79SaCas9KKH91 | exon79 | SaCas9KKH | + | TGAAAGAGTAAAGCTTTTTCCT | ACCAGT |
| 2787 | E79SaCas9KKH92 | exon79 | SaCas9KKH | + | TGAGCTTTTCTCCTCTTTTTTG | AGCAAT |
| 2788 | E79SaCas9KKH93 | exon79 | SaCas9KKH | + | GTTTGTTTATATATTTAACCTG | TCTAAT |
| 2789 | E79SaCas9KKH94 | exon79 | SaCas9KKH | + | TTAACCTGTCTAATCCACCAAG | AAGGGT |
| 2790 | E79SaCas9KKH95 | exon79 | SaCas9KKH | + | AAGAAGGGTTTTTTTGTAACAT | TTGAAT |
| 2791 | E79SaCas9KKH96 | exon79 | SaCas9KKH | + | AGGGTTTTTTTGTAACATTTGA | ATCAAT |
| 2792 | E79SaCas9KKH97 | exon79 | SaCas9KKH | + | ACCTGTGTGGAACTACTCGCAG | AGAAAT |
| 2793 | E79SaCas9KKH98 | exon79 | SaCas9KKH | + | GAACTACTCGCAGAGAAATGCA | AAGGAT |
| 2794 | E79SaCas9KKH99 | exon79 | SaCas9KKH | + | AGAGAAATGCAAAGGATGGAAA | CACAGT |
| 2795 | E79SaCas9KKH100 | exon79 | SaCas9KKH | + | TGGAAACACAGTTCATGGGCTT | CTGGGT |
| 2796 | E79SaCas9KKH101 | exon79 | SaCas9KKH | + | AACACAGTTCATGGGCTTCTGG | GTTGAT |
| 2797 | E79SaCas9KKH102 | exon79 | SaCas9KKH | + | ATGGGCTTCTGGGTTGATACCT | GTCAGT |
| 2798 | E79SaCas9KKH103 | exon79 | SaCas9KKH | + | TGGGTTGATACCTGTCAGTATC | ACAAAT |
| 2799 | E79SaCas9KKH104 | exon79 | SaCas9KKH | + | TGATACCTGTCAGTATCACAAA | TGTGAT |
| 2800 | E79SaCas9KKH105 | exon79 | SaCas9KKH | + | GCTACTGTTTTACACCTTTTCC | CAAAGT |
| 2801 | E79SaCas9KKH106 | exon79 | SaCas9KKH | + | CTTTTCCCAAAGTTTATTTATT | TTAAAT |
| 2802 | E79SaCas9KKH107 | exon79 | SaCas9KKH | + | TTTAAAAACTCATCCCACATGG | GACAAT |
| 2803 | E79SaCas9KKH108 | exon79 | SaCas9KKH | + | AAAACTCATCCCACATGGGACA | ATAAAT |
| 2804 | E79SaCas9KKH109 | exon79 | SaCas9KKH | + | AAAAGCAACAAAAACCAAACCA | CCCAGT |
| 2805 | E79SaCas9KKH110 | exon79 | SaCas9KKH | + | CCTTTTGACTGTGAGAAGAGGG | CATAAT |
| 2806 | E79SaCas9KKH111 | exon79 | SaCas9KKH | + | TTTGACTGTGAGAAGAGGGCAT | AATAAT |
| 2807 | E79SaCas9KKH112 | exon79 | SaCas9KKH | + | CTGTGAGAAGAGGGCATAATAA | TTTAGT |
| 2808 | E79SaCas9KKH113 | exon79 | SaCas9KKH | + | GAAGAGGGCATAATAATTTAGT | TGTAAT |
| 2809 | E79SaCas9KKH114 | exon79 | SaCas9KKH | + | ACAGAGAACTTTATGTATTATG | AACAAT |
| 2810 | E79SaCas9KKH115 | exon79 | SaCas9KKH | + | CTTTATGTATTATGAACAATCA | TCCAAT |
| 2811 | E79SaCas9KKH116 | exon79 | SaCas9KKH | + | CAATCATCCAATCCTTCACTTA | AAGAGT |
| 2812 | E79SaCas9KKH117 | exon79 | SaCas9KKH | + | AAAGAGTGGCCTACTCCTTCAC | AGGGAT |
| 2813 | E79SaCas9KKH118 | exon79 | SaCas9KKH | + | TACTCCTTCACAGGGATGGGCT | GGGAAT |
| 2814 | E79SaCas9KKH119 | exon79 | SaCas9KKH | + | TATCATCGTCCTGCTACTGCTT | GGGAGT |
| 2815 | E79SaCas9KKH120 | exon79 | SaCas9KKH | + | TCCTGCTACTGCTTGGGAGTTA | AAAAAT |
| 2816 | E79SaCas9KKH121 | exon79 | SaCas9KKH | + | GCTTGGGAGTTAAAAAATACCT | TCTGAT |
| 2817 | E79SaCas9KKH122 | exon79 | SaCas9KKH | + | AAAAAATACCTTCTGATGTTCA | CAAGGT |
| 2818 | E79SaCas9KKH123 | exon79 | SaCas9KKH | + | TACCTTCTGATGTTCACAAGGT | CAGAAT |
| 2819 | E79SaCas9KKH124 | exon79 | SaCas9KKH | + | TGTTCACAAGGTCAGAATACCT | TCTGAT |
| 2820 | E79SaCas9KKH125 | exon79 | SaCas9KKH | + | CACAAGGTCAGAATACCTTCTG | ATTGAT |
| 2821 | E79SaCas9KKH126 | exon79 | SaCas9KKH | + | ATTGATTTCCACTGAAGCATCA | TTAAAT |
| 2822 | E79SaCas9KKH127 | exon79 | SaCas9KKH | + | TTCCACTGAAGCATCATTAAAT | CTAAAT |
| 2823 | E79SaCas9KKH128 | exon79 | SaCas9KKH | + | TGGCATTGCTAGCAGCAGGAAG | CTGAAT |
| 2824 | E79SaCas9KKH129 | exon79 | SaCas9KKH | + | CTAGCAGCAGGAAGCTGAATGT | ATCAAT |
| 2825 | E79SaCas9KKH130 | exon79 | SaCas9KKH | + | CAGCAGGAAGCTGAATGTATCA | ATCAAT |
| 2826 | E79SaCas9KKH131 | exon79 | SaCas9KKH | + | AGGAAGCTGAATGTATCAATCA | ATCAAT |
| 2827 | E79SaCas9KKH132 | exon79 | SaCas9KKH | + | AGCTGAATGTATCAATCAATCA | ATCAAT |
| 2828 | E79SaCas9KKH133 | exon79 | SaCas9KKH | + | CAATCAATCAATCAACCAACCA | ACCGAT |
| 2829 | E79SaCas9KKH134 | exon79 | SaCas9KKH | + | AACCAACCAACCGATTACTCAC | TCTGAT |
| 2830 | E79SaCas9KKH135 | exon79 | SaCas9KKH | + | ACCAACCGATTACTCACTCTGA | TATAAT |
| 2831 | E79SaCas9KKH136 | exon79 | SaCas9KKH | + | ACCGATTACTCACTCTGATATA | ATAAGT |
| 2832 | E79SaCas9KKH137 | exon79 | SaCas9KKH | + | TTCATTCACATGTTCCCTTTAA | AAAAAT |
| 2833 | E79SaCas9KKH138 | exon79 | SaCas9KKH | + | TCACATGTTCCCTTTAAAAAAA | TCCAAT |
| 2834 | E79SaCas9KKH139 | exon79 | SaCas9KKH | + | AATACTTTACTTTACTTTCGTT | GTCAGT |
| 2835 | E79SaCas9KKH140 | exon79 | SaCas9KKH | + | TACTTTACTTTCGTTGTCAGTG | GAAAGT |
| 2836 | E79SaCas9KKH141 | exon79 | SaCas9KKH | + | TCGTTGTCAGTGGAAAGTTGTT | TAAAAT |
| 2837 | E79SaCas9KKH142 | exon79 | SaCas9KKH | + | ATGAGAAACATCTGGAGCTGTA | GACAAT |
| 2838 | E79SaCas9KKH143 | exon79 | SaCas9KKH | + | CATCTGGAGCTGTAGACAATGT | TTTAGT |
| 2839 | E79SaCas9KKH144 | exon79 | SaCas9KKH | + | GGAGCTGTAGACAATGTTTTAG | TGTGGT |
| 2840 | E79SaCas9KKH145 | exon79 | SaCas9KKH | + | TGTAGACAATGTTTTAGTGTGG | TGTAGT |
| 2841 | E79SaCas9KKH146 | exon79 | SaCas9KKH | + | CCTCCTGGCTTCCGGCTCCGGG | AAAAAT |
| 2842 | E79SaCas9KKH147 | exon79 | SaCas9KKH | + | GGAAAAATCCATTCTAGACCAA | GCAGGT |
| 2843 | E79SaCas9KKH148 | exon79 | SaCas9KKH | + | ATTCTAGACCAAGCAGGTAAGC | CTGGAT |
| 2844 | E79SaCas9KKH149 | exon79 | SaCas9KKH | + | AGGTAAGCCTGGATGACTGACT | AGAAGT |
| 2845 | E79SaCas9KKH150 | exon79 | SaCas9KKH | + | TAAGCCTGGATGACTGACTAGA | AGTAAT |
| 2846 | E79SaCas9KKH151 | exon79 | SaCas9KKH | + | ACTAGAAGTAATTTCTTTCTAT | TAGGAT |
| 2847 | E79SaCas9KKH152 | exon79 | SaCas9KKH | + | TAGGATGTGACATGAACATTTA | AAAAAT |
| 2848 | E79SaCas9KKH153 | exon79 | SaCas9KKH | + | ACATGAACATTTAAAAAATGGA | AAAAGT |
| 2849 | E79SaCas9KKH154 | exon79 | SaCas9KKH | + | GAACATTTAAAAAATGGAAAAA | GTCAGT |
| 2850 | E79SaCas9KKH155 | exon79 | SaCas9KKH | + | AAAATGGAAAAAGTCAGTCTAT | AGAAAT |
| 2851 | E79SaCas9KKH156 | exon79 | SaCas9KKH | + | CGTATCTCTTTATCTATATAAC | TATAGT |
| 2852 | E79SaCas9KKH157 | exon79 | SaCas9KKH | + | GTATTTATATACTTATAGACAT | ATAGAT |
| 2853 | E79SaCas9KKH158 | exon79 | SaCas9KKH | + | TACTTATAGACATATAGATATA | TGAAAT |
| 2854 | E79SaCas9KKH159 | exon79 | SaCas9KKH | + | CTCAAGCCTGCCCCACTCAGCT | GACAGT |
| 2855 | E79SaCas9KKH160 | exon79 | SaCas9KKH | + | TGCCCCACTCAGCTGACAGTTC | TCAAAT |
| 2856 | E79SaCas9KKH161 | exon79 | SaCas9KKH | + | CTCAGCTGACAGTTCTCAAATG | AGCAGT |
| 2857 | E79SaCas9KKH162 | exon79 | SaCas9KKH | + | GACAGTTCTCAAATGAGCAGTG | TGTAGT |
| 2858 | E79SaCas9KKH163 | exon79 | SaCas9KKH | + | AGTTCTCAAATGAGCAGTGTGT | AGTAGT |
| 2859 | E79SaCas9KKH164 | exon79 | SaCas9KKH | + | AATGAGCAGTGTGTAGTAGTCA | TTTGGT |
| 2860 | E79SaCas9KKH165 | exon79 | SaCas9KKH | + | GCAGTGTGTAGTAGTCATTTGG | TGTGGT |
| 2861 | E79SaCas9KKH166 | exon79 | SaCas9KKH | + | GTGTGTAGTAGTCATTTGGTGT | GGTGGT |
| 2862 | E79SaCas9KKH167 | exon79 | SaCas9KKH | + | AGTCATTTGGTGTGGTGGTAGA | GGAAGT |
| 2863 | E79SaCas9KKH168 | exon79 | SaCas9KKH | + | TGGTGGTAGAGGAAGTCTTATC | TTTAAT |
| 2864 | E79SaCas9KKH169 | exon79 | SaCas9KKH | + | ATATGCAAAAAAAGAAAAAGCC | ATGAAT |
| 2865 | E79SaCas9KKH170 | exon79 | SaCas9KKH | + | AAGAAAAAGCCATGAATTTCAT | ATGGAT |
| 2866 | E79SaCas9KKH171 | exon79 | SaCas9KKH | + | TTTCATATGGATATCACGCCAA | AAGGAT |
| 2867 | E79SaCas9KKH172 | exon79 | SaCas9KKH | + | ATATCACGCCAAAAGGATGCAA | AACAAT |
| 2868 | E79SaCas9KKH173 | exon79 | SaCas9KKH | + | GATGCAAAACAATGCGCTGCCT | CAAAGT |
| 2869 | E79SaCas9KKH174 | exon79 | SaCas9KKH | + | TGTGTGTGTTTGTTTTGTTTTT | AGGGGT |
| 2870 | E79SaCas9KKH175 | exon79 | SaCas9KKH | + | AACTTTTTTTTATAAAGCACAC | TTTAGT |
| 2871 | E79SaCas9KKH176 | exon79 | SaCas9KKH | + | TTTTATAAAGCACACTTTAGTT | TACAAT |
| 2872 | E79SaCas9KKH177 | exon79 | SaCas9KKH | + | ACAATCTTTCTTTATAACTGTT | ATAAAT |
| 2873 | E79SaCas9KKH178 | exon79 | SaCas9KKH | + | TGTTATAAATTTTTAAACAACC | CAAAAT |
| 2874 | E79SaCas9KKH179 | exon79 | SaCas9KKH | + | ACCCAAAATGCGTTCCATATAA | AGAAAT |
| 2875 | E79SaCas9KKH180 | exon79 | SaCas9KKH | + | ATGCGTTCCATATAAAGAAATG | GCAAGT |
| 2876 | E79SaCas9KKH181 | exon79 | SaCas9KKH | + | AAATGGCAAGTTATTTAGCTAT | CAAGAT |
| 2877 | E79SaCas9KKH182 | exon79 | SaCas9KKH | + | ATTTAGCTATCAAGATTTTACA | TGTAGT |
| 2878 | E79SaCas9KKH183 | exon79 | SaCas9KKH | + | TAGTTTTCTTATAACTTTTTTG | TACAAT |
| 2879 | E79SaCas9KKH184 | exon79 | SaCas9KKH | + | TAAAACCTGCCATTGTTAACAA | AACAAT |
| 2880 | E79SaCas9KKH185 | exon79 | SaCas9KKH | + | CAATAACAGACTTAGAAACTAC | TGAAAT |
| 2881 | E79SaCas9KKH186 | exon79 | SaCas9KKH | + | AGACTTAGAAACTACTGAAATC | TACAGT |
| 2882 | E79SaCas9KKH187 | exon79 | SaCas9KKH | + | TAGAAACTACTGAAATCTACAG | TATAAT |
| 2883 | E79SaCas9KKH188 | exon79 | SaCas9KKH | + | GTATAATACCACTACCCTTCAC | AAAAAT |
| 2884 | E79SaCas9KKH189 | exon79 | SaCas9KKH | + | TACCACTACCCTTCACAAAAAT | ATAGAT |
| 2885 | E79SaCas9KKH190 | exon79 | SaCas9KKH | + | TATTTCTTGTAAACTCTTACTG | TCTAAT |
| 2886 | E79SaCas9KKH191 | exon79 | SaCas9KKH | + | ACTGTCTAATCCTCTTTGTTGT | ATGAAT |
| 2887 | E79SaCas9KKH192 | exon79 | SaCas9KKH | + | ATGAATATTATAAAAACCATGC | GGGAAT |
| 2888 | E79SaCas9KKH193 | exon79 | SaCas9KKH | + | TTATAAAAACCATGCGGGAATC | AGGAGT |
| 2889 | E79SaCas9KKH194 | exon79 | SaCas9KKH | + | TGCTCCTTCTTCATCTGTCATG | ACTGAT |
| 2890 | E79SaCas9KKH195 | exon79 | SaCas9KKH | + | ACTAAGGACTCCATCGCTCTGC | CCAAAT |
| 2891 | E79SaCas9KKH197 | exon79 | SaCas9KKH | − | AAAGCACGCAGTTATGTTACAA | AAAAGT |
| 2892 | E79SaCas9KKH198 | exon79 | SaCas9KKH | − | TACTGTGTATCTCAATAAAGCA | CGCAGT |
| 2893 | E79SaCas9KKH199 | exon79 | SaCas9KKH | − | ATAGTACTGCTTTACTGTGTAT | CTCAAT |
| 2894 | E79SaCas9KKH200 | exon79 | SaCas9KKH | − | AATATATGCCTTACTATTGTAT | TATAGT |
| 2895 | E79SaCas9KKH201 | exon79 | SaCas9KKH | − | TTTCACAACATATCAGACTTCA | CCAAAT |
| 2896 | E79SaCas9KKH202 | exon79 | SaCas9KKH | − | TTTACGAATTATTTTTTTAAAC | TTCAGT |
| 2897 | E79SaCas9KKH203 | exon79 | SaCas9KKH | − | TAACACCAACACTGTAACATTT | ACGAAT |
| 2898 | E79SaCas9KKH204 | exon79 | SaCas9KKH | − | TACTGAGTTCTTACTTGAGTAT | CATAAT |
| 2899 | E79SaCas9KKH205 | exon79 | SaCas9KKH | − | TTTTCAGGTACTGAGTTCTTAC | TTGAGT |
| 2900 | E79SaCas9KKH206 | exon79 | SaCas9KKH | − | GTTTTGTCATTGTTTTCAGGTA | CTGAGT |
| 2901 | E79SaCas9KKH207 | exon79 | SaCas9KKH | − | ATGGCATGTTTTGTCATTGTTT | TCAGGT |
| 2902 | E79SaCas9KKH208 | exon79 | SaCas9KKH | − | CACCAAGTATTAAACTGTAAAT | CATAAT |
| 2903 | E79SaCas9KKH209 | exon79 | SaCas9KKH | − | TATAACCACCAAGTATTAAACT | GTAAAT |
| 2904 | E79SaCas9KKH210 | exon79 | SaCas9KKH | − | CGTGTTGTGTTCTTTATAACCA | CCAAGT |
| 2905 | E79SaCas9KKH211 | exon79 | SaCas9KKH | − | TTATTGCTGCATTTTAAGCATA | ATTAAT |
| 2906 | E79SaCas9KKH212 | exon79 | SaCas9KKH | − | AGCTTTATTGCTGCATTTTAAG | CATAAT |
| 2907 | E79SaCas9KKH213 | exon79 | SaCas9KKH | − | GAGTCTGTCATAATATTTGAAC | AAAAAT |
| 2908 | E79SaCas9KKH214 | exon79 | SaCas9KKH | − | ATTAGCTCTGGAGTGAGTCTGT | CATAAT |
| 2909 | E79SaCas9KKH215 | exon79 | SaCas9KKH | − | TTTTAGACACATTAGCTCTGGA | GTGAGT |
| 2910 | E79SaCas9KKH216 | exon79 | SaCas9KKH | − | TTTCTTTTAGACACATTAGCTC | TGGAGT |
| 2911 | E79SaCas9KKH217 | exon79 | SaCas9KKH | − | TAGAGTGCATAAATAATTTTGT | TTTAAT |
| 2912 | E79SaCas9KKH218 | exon79 | SaCas9KKH | − | TCAGAGGTAAATAGAGTGCATA | AATAAT |
| 2913 | E79SaCas9KKH219 | exon79 | SaCas9KKH | − | AAATCAGAGGTAAATAGAGTGC | ATAAAT |
| 2914 | E79SaCas9KKH220 | exon79 | SaCas9KKH | − | TCATTCTAAAATCAGAGGTAAA | TAGAGT |
| 2915 | E79SaCas9KKH221 | exon79 | SaCas9KKH | − | AAGTTTCATTCTAAAATCAGAG | GTAAAT |
| 2916 | E79SaCas9KKH222 | exon79 | SaCas9KKH | − | AAGTAAGTTTCATTCTAAAATC | AGAGGT |
| 2917 | E79SaCas9KKH223 | exon79 | SaCas9KKH | − | TTTAAGTAAGTAAGTTTCATTC | TAAAAT |
| 2918 | E79SaCas9KKH224 | exon79 | SaCas9KKH | − | TCCTACTAAGAAGTTTAAGTAA | GTAAGT |
| 2919 | E79SaCas9KKH225 | exon79 | SaCas9KKH | − | TACATCCTACTAAGAAGTTTAA | GTAAGT |
| 2920 | E79SaCas9KKH226 | exon79 | SaCas9KKH | − | ACTTTACATCCTACTAAGAAGT | TTAAGT |
| 2921 | E79SaCas9KKH227 | exon79 | SaCas9KKH | − | GGGGTTACTTTACATCCTACTA | AGAAGT |
| 2922 | E79SaCas9KKH228 | exon79 | SaCas9KKH | − | TTTAAAACTCAGATTTAAAACA | AGGGGT |
| 2923 | E79SaCas9KKH229 | exon79 | SaCas9KKH | − | TTTACCCAAGGATTTTTAAAAC | TCAGAT |
| 2924 | E79SaCas9KKH230 | exon79 | SaCas9KKH | − | ACGCTGGACCTTTTCTTTACCC | AAGGAT |
| 2925 | E79SaCas9KKH231 | exon79 | SaCas9KKH | − | AAATTACCAAATTACATGAAGA | TTTGGT |
| 2926 | E79SaCas9KKH232 | exon79 | SaCas9KKH | − | GTAACAAATTACCAAATTACAT | GAAGAT |
| 2927 | E79SaCas9KKH233 | exon79 | SaCas9KKH | − | AAAGCTCTAAGGTAACAAATTA | CCAAAT |
| 2928 | E79SaCas9KKH234 | exon79 | SaCas9KKH | − | GAAAACCCAAAGCTCTAAGGTA | ACAAAT |
| 2929 | E79SaCas9KKH235 | exon79 | SaCas9KKH | − | TTCAAAAGAAAACCCAAAGCTC | TAAGGT |
| 2930 | E79SaCas9KKH236 | exon79 | SaCas9KKH | − | TTATAATTCTTTCTTTTTCCTT | CATAAT |
| 2931 | E79SaCas9KKH237 | exon79 | SaCas9KKH | − | TTGCGTTATTTTCTTTTTCCTT | TATAAT |
| 2932 | E79SaCas9KKH238 | exon79 | SaCas9KKH | − | TGTTCCTGATAATTGTGCACAC | CTGAGT |
| 2933 | E79SaCas9KKH239 | exon79 | SaCas9KKH | − | ACTTTGGTTTTGGGGTGTTCCT | GATAAT |
| 2934 | E79SaCas9KKH240 | exon79 | SaCas9KKH | − | CTCACTTTGGTTTTGGGGTGTT | CCTGAT |
| 2935 | E79SaCas9KKH241 | exon79 | SaCas9KKH | − | TATTTCTACCTCACTTTGGTTT | TGGGGT |
| 2936 | E79SaCas9KKH242 | exon79 | SaCas9KKH | − | TCTCATGCTATTTCTACCTCAC | TTTGGT |
| 2937 | E79SaCas9KKH243 | exon79 | SaCas9KKH | − | TTTTGTCCATTATTAATAATTA | ATTAAT |
| 2938 | E79SaCas9KKH244 | exon79 | SaCas9KKH | − | TGGGTTTTGTCCATTATTAATA | ATTAAT |
| 2939 | E79SaCas9KKH245 | exon79 | SaCas9KKH | − | AGAGTGGGTTTTGTCCATTATT | AATAAT |
| 2940 | E79SaCas9KKH246 | exon79 | SaCas9KKH | − | TGGAGAGTGGGTTTTGTCCATT | ATTAAT |
| 2941 | E79SaCas9KKH247 | exon79 | SaCas9KKH | − | AAGTGTAATTAGCTTTTGGAGA | GTGGGT |
| 2942 | E79SaCas9KKH248 | exon79 | SaCas9KKH | − | CATCAAGTGTAATTAGCTTTTG | GAGAGT |
| 2943 | E79SaCas9KKH249 | exon79 | SaCas9KKH | − | TGGAGAGTGGGCTGACATCAAG | TGTAAT |
| 2944 | E79SaCas9KKH250 | exon79 | SaCas9KKH | − | GCTTTTGGAGAGTGGGCTGACA | TCAAGT |
| 2945 | E79SaCas9KKH251 | exon79 | SaCas9KKH | − | CATCAAGTGTAATTAGCTTTTG | GAGAGT |
| 2946 | E79SaCas9KKH252 | exon79 | SaCas9KKH | − | ATCTGTTACCTCTGACATCAAG | TGTAAT |
| 2947 | E79SaCas9KKH253 | exon79 | SaCas9KKH | − | TGCAAATCTGTTACCTCTGACA | TCAAGT |
| 2948 | E79SaCas9KKH254 | exon79 | SaCas9KKH | − | CCACCGTGTGACCTATAATTTT | GCAAAT |
| 2949 | E79SaCas9KKH255 | exon79 | SaCas9KKH | − | CAATAGATACCACCGTGTGACC | TATAAT |
| 2950 | E79SaCas9KKH256 | exon79 | SaCas9KKH | − | TGATTTTTAAATCATTCATTCA | ATAGAT |
| 2951 | E79SaCas9KKH257 | exon79 | SaCas9KKH | − | TTTTTGATTTTTAAATCATTCA | TTCAAT |
| 2952 | E79SaCas9KKH258 | exon79 | SaCas9KKH | − | CCATTTTATTTCTTTTTGATTT | TTAAAT |
| 2953 | E79SaCas9KKH259 | exon79 | SaCas9KKH | − | CTTTCATGCCATTTTATTTCTT | TTTGAT |
| 2954 | E79SaCas9KKH260 | exon79 | SaCas9KKH | − | AGCTCAAGAGGAAAAGCTAAGG | ACTGGT |
| 2955 | E79SaCas9KKH261 | exon79 | SaCas9KKH | − | TTAAATATATAAACAAACAAAC | AAAAAT |
| 2956 | E79SaCas9KKH262 | exon79 | SaCas9KKH | − | CCTTCTTGGTGGATTAGACAGG | TTAAAT |
| 2957 | E79SaCas9KKH263 | exon79 | SaCas9KKH | − | AAAACCCTTCTTGGTGGATTAG | ACAGGT |
| 2958 | E79SaCas9KKH264 | exon79 | SaCas9KKH | − | TGTTACAAAAAAACCCTTCTTG | GTGGAT |
| 2959 | E79SaCas9KKH265 | exon79 | SaCas9KKH | − | CAAATGTTACAAAAAAACCCTT | CTTGGT |
| 2960 | E79SaCas9KKH266 | exon79 | SaCas9KKH | − | GTAAGAAAGAAGGCAAATTGAT | TCAAAT |
| 2961 | E79SaCas9KKH267 | exon79 | SaCas9KKH | − | AAGTAAGTAAGAAAGAAGGCAA | ATTGAT |
| 2962 | E79SaCas9KKH268 | exon79 | SaCas9KKH | − | TTGTAAGTAAGTAAGAAAGAAG | GCAAAT |
| 2963 | E79SaCas9KKH269 | exon79 | SaCas9KKH | − | GTAGTTCCACACAGGTTTGTAA | GTAAGT |
| 2964 | E79SaCas9KKH270 | exon79 | SaCas9KKH | − | GCGAGTAGTTCCACACAGGTTT | GTAAGT |
| 2965 | E79SaCas9KKH271 | exon79 | SaCas9KKH | − | ATTTCTCTGCGAGTAGTTCCAC | ACAGGT |
| 2966 | E79SaCas9KKH272 | exon79 | SaCas9KKH | − | CCATCCTTTGCATTTCTCTGCG | AGTAGT |
| 2967 | E79SaCas9KKH273 | exon79 | SaCas9KKH | − | TTTCCATCCTTTGCATTTCTCT | GCGAGT |
| 2968 | E79SaCas9KKH274 | exon79 | SaCas9KKH | − | CCCCATCACATTTGTGATACTG | ACAGGT |
| 2969 | E79SaCas9KKH275 | exon79 | SaCas9KKH | − | AAAACAGTAGCCCCATCACATT | TGTGAT |
| 2970 | E79SaCas9KKH276 | exon79 | SaCas9KKH | − | TAAACTTTGGGAAAAGGTGTAA | AACAGT |
| 2971 | E79SaCas9KKH277 | exon79 | SaCas9KKH | − | TTAAAATAAATAAACTTTGGGA | AAAGGT |
| 2972 | E79SaCas9KKH278 | exon79 | SaCas9KKH | − | ATGCCACAAGACATAATTTAAA | ATAAAT |
| 2973 | E79SaCas9KKH279 | exon79 | SaCas9KKH | − | TTAAATGCCACAAGACATAATT | TAAAAT |
| 2974 | E79SaCas9KKH280 | exon79 | SaCas9KKH | − | TGAGTTTTTAAATGCCACAAGA | CATAAT |
| 2975 | E79SaCas9KKH281 | exon79 | SaCas9KKH | − | TTGTCCCATGTGGGATGAGTTT | TTAAAT |
| 2976 | E79SaCas9KKH282 | exon79 | SaCas9KKH | − | TAGATTTATTGTCCCATGTGGG | ATGAGT |
| 2977 | E79SaCas9KKH283 | exon79 | SaCas9KKH | − | TTTTTAGATTTATTGTCCCATG | TGGGAT |
| 2978 | E79SaCas9KKH284 | exon79 | SaCas9KKH | − | TGGTTTGGTTTTTGTTGCTTTT | TTAGAT |
| 2979 | E79SaCas9KKH285 | exon79 | SaCas9KKH | − | ACAGTCAAAAGGAACTGGGTGG | TTTGGT |
| 2980 | E79SaCas9KKH286 | exon79 | SaCas9KKH | − | TTCTCACAGTCAAAAGGAACTG | GGTGGT |
| 2981 | E79SaCas9KKH287 | exon79 | SaCas9KKH | − | CTCTTCTCACAGTCAAAAGGAA | CTGGGT |
| 2982 | E79SaCas9KKH288 | exon79 | SaCas9KKH | − | CTAAATTATTATGCCCTCTTCT | CACAGT |
| 2983 | E79SaCas9KKH289 | exon79 | SaCas9KKH | − | ATAAAGTTCTCTGTAATTACAA | CTAAAT |
| 2984 | E79SaCas9KKH290 | exon79 | SaCas9KKH | − | GTTCATAATACATAAAGTTCTC | TGTAAT |
| 2985 | E79SaCas9KKH291 | exon79 | SaCas9KKH | − | TTGGATGATTGTTCATAATACA | TAAAGT |
| 2986 | E79SaCas9KKH292 | exon79 | SaCas9KKH | − | AGTGAAGGATTGGATGATTGTT | CATAAT |
| 2987 | E79SaCas9KKH293 | exon79 | SaCas9KKH | − | CCACTCTTTAAGTGAAGGATTG | GATGAT |
| 2988 | E79SaCas9KKH294 | exon79 | SaCas9KKH | − | AGGCCACTCTTTAAGTGAAGGA | TTGGAT |
| 2989 | E79SaCas9KKH295 | exon79 | SaCas9KKH | − | GGAGTAGGCCACTCTTTAAGTG | AAGGAT |
| 2990 | E79SaCas9KKH296 | exon79 | SaCas9KKH | − | CTGTGAAGGAGTAGGCCACTCT | TTAAGT |
| 2991 | E79SaCas9KKH297 | exon79 | SaCas9KKH | − | GATTCCCAGCCCATCCCTGTGA | AGGAGT |
| 2992 | E79SaCas9KKH298 | exon79 | SaCas9KKH | − | ACGATGATAGGGCTGGAGGGCT | ATGGAT |
| 2993 | E79SaCas9KKH299 | exon79 | SaCas9KKH | − | AACTCCCAAGCAGTAGCAGGAC | GATGAT |
| 2994 | E79SaCas9KKH300 | exon79 | SaCas9KKH | − | TTTAACTCCCAAGCAGTAGCAG | GACGAT |
| 2995 | E79SaCas9KKH301 | exon79 | SaCas9KKH | − | AGAAGGTATTTTTTAACTCCCA | AGCAGT |
| 2996 | E79SaCas9KKH302 | exon79 | SaCas9KKH | − | TATTCTGACCTTGTGAACATCA | GAAGGT |
| 2997 | E79SaCas9KKH303 | exon79 | SaCas9KKH | − | ATGCTTCAGTGGAAATCAATCA | GAAGGT |
| 2998 | E79SaCas9KKH304 | exon79 | SaCas9KKH | − | ATTTAATGATGCTTCAGTGGAA | ATCAAT |
| 2999 | E79SaCas9KKH305 | exon79 | SaCas9KKH | − | TTAGATTTAATGATGCTTCAGT | GGAAAT |
| 3000 | E79SaCas9KKH306 | exon79 | SaCas9KKH | − | CACGATTTAGATTTAATGATGC | TTCAGT |
| 3001 | E79SaCas9KKH307 | exon79 | SaCas9KKH | − | AGCAATGCCACGATTTAGATTT | AATGAT |
| 3002 | E79SaCas9KKH308 | exon79 | SaCas9KKH | − | GCTAGCAATGCCACGATTTAGA | TTTAAT |
| 3003 | E79SaCas9KKH309 | exon79 | SaCas9KKH | − | CTGCTGCTAGCAATGCCACGAT | TTAGAT |
| 3004 | E79SaCas9KKH310 | exon79 | SaCas9KKH | − | AGCTTCCTGCTGCTAGCAATGC | CACGAT |
| 3005 | E79SaCas9KKH311 | exon79 | SaCas9KKH | − | ATACATTCAGCTTCCTGCTGCT | AGCAAT |
| 3006 | E79SaCas9KKH312 | exon79 | SaCas9KKH | − | TGGTTGGTTGATTGATTGATTG | ATTGAT |
| 3007 | E79SaCas9KKH313 | exon79 | SaCas9KKH | − | CGGTTGGTTGGTTGATTGATTG | ATTGAT |
| 3008 | E79SaCas9KKH314 | exon79 | SaCas9KKH | − | TAATCGGTTGGTTGGTTGATTG | ATTGAT |
| 3009 | E79SaCas9KKH315 | exon79 | SaCas9KKH | − | TGAGTAATCGGTTGGTTGGTTG | ATTGAT |
| 3010 | E79SaCas9KKH316 | exon79 | SaCas9KKH | − | AGAGTGAGTAATCGGTTGGTTG | GTTGAT |
| 3011 | E79SaCas9KKH317 | exon79 | SaCas9KKH | − | TATCAGAGTGAGTAATCGGTTG | GTTGGT |
| 3012 | E79SaCas9KKH318 | exon79 | SaCas9KKH | − | ATTATATCAGAGTGAGTAATCG | GTTGGT |
| 3013 | E79SaCas9KKH319 | exon79 | SaCas9KKH | − | ACTTATTATATCAGAGTGAGTA | ATCGGT |
| 3014 | E79SaCas9KKH320 | exon79 | SaCas9KKH | − | CAGGACTTATTATATCAGAGTG | AGTAAT |
| 3015 | E79SaCas9KKH321 | exon79 | SaCas9KKH | − | ACACAGGACTTATTATATCAGA | GTGAGT |
| 3016 | E79SaCas9KKH322 | exon79 | SaCas9KKH | − | GAATACACAGGACTTATTATAT | CAGAGT |
| 3017 | E79SaCas9KKH323 | exon79 | SaCas9KKH | − | TTTTTTTAAAGGGAACATGTGA | ATGAAT |
| 3018 | E79SaCas9KKH324 | exon79 | SaCas9KKH | − | TGGATTTTTTTAAAGGGAACAT | GTGAAT |
| 3019 | E79SaCas9KKH325 | exon79 | SaCas9KKH | − | ACAACGAAAGTAAAGTAAAGTA | TTGGAT |
| 3020 | E79SaCas9KKH326 | exon79 | SaCas9KKH | − | TCCACTGACAACGAAAGTAAAG | TAAAGT |
| 3021 | E79SaCas9KKH327 | exon79 | SaCas9KKH | − | AACTTTCCACTGACAACGAAAG | TAAAGT |
| 3022 | E79SaCas9KKH328 | exon79 | SaCas9KKH | − | TAAACAACTTTCCACTGACAAC | GAAAGT |
| 3023 | E79SaCas9KKH329 | exon79 | SaCas9KKH | − | CACTAAAACATTGTCTACAGCT | CCAGAT |
| 3024 | E79SaCas9KKH330 | exon79 | SaCas9KKH | − | AGGCTTACCTGCTTGGTCTAGA | ATGGAT |
| 3025 | E79SaCas9KKH331 | exon79 | SaCas9KKH | − | ATCCAGGCTTACCTGCTTGGTC | TAGAAT |
| 3026 | E79SaCas9KKH332 | exon79 | SaCas9KKH | − | GTCAGTCATCCAGGCTTACCTG | CTTGGT |
| 3027 | E79SaCas9KKH333 | exon79 | SaCas9KKH | − | TAATAGAAAGAAATTACTTCTA | GTCAGT |
| 3028 | E79SaCas9KKH334 | exon79 | SaCas9KKH | − | ATCCTAATAGAAAGAAATTACT | TCTAGT |
| 3029 | E79SaCas9KKH335 | exon79 | SaCas9KKH | − | TTCATGTCACATCCTAATAGAA | AGAAAT |
| 3030 | E79SaCas9KKH336 | exon79 | SaCas9KKH | − | TTTTTAAATGTTCATGTCACAT | CCTAAT |
| 3031 | E79SaCas9KKH337 | exon79 | SaCas9KKH | − | ATAGACTGACTTTTTCCATTTT | TTAAAT |
| 3032 | E79SaCas9KKH338 | exon79 | SaCas9KKH | − | ATAGTTATATAGATAAAGAGAT | ACGAAT |
| 3033 | E79SaCas9KKH339 | exon79 | SaCas9KKH | − | AATACTATAGTTATATAGATAA | AGAGAT |
| 3034 | E79SaCas9KKH340 | exon79 | SaCas9KKH | − | AGTATATAAATACTATAGTTAT | ATAGAT |
| 3035 | E79SaCas9KKH341 | exon79 | SaCas9KKH | − | ATGTCTATAAGTATATAAATAC | TATAGT |
| 3036 | E79SaCas9KKH342 | exon79 | SaCas9KKH | − | ATATCTATATGTCTATAAGTAT | ATAAAT |
| 3037 | E79SaCas9KKH343 | exon79 | SaCas9KKH | − | CATTTCATATATCTATATGTCT | ATAAGT |
| 3038 | E79SaCas9KKH344 | exon79 | SaCas9KKH | − | CTGTCAGCTGAGTGGGGCAGGC | TTGAGT |
| 3039 | E79SaCas9KKH345 | exon79 | SaCas9KKH | − | CTGCTCATTTGAGAACTGTCAG | CTGAGT |
| 3040 | E79SaCas9KKH346 | exon79 | SaCas9KKH | − | TAAGACTTCCTCTACCACCACA | CCAAAT |
| 3041 | E79SaCas9KKH347 | exon79 | SaCas9KKH | − | GCTTTTTCTTTTTTTGCATATT | AAAGAT |
| 3042 | E79SaCas9KKH348 | exon79 | SaCas9KKH | − | TCCTTTTGGCGTGATATCCATA | TGAAAT |
| 3043 | E79SaCas9KKH349 | exon79 | SaCas9KKH | − | GCATTGTTTTGCATCCTTTTGG | CGTGAT |
| 3044 | E79SaCas9KKH350 | exon79 | SaCas9KKH | − | AACTAAAGTGTGCTTTATAAAA | AAAAGT |
| 3045 | E79SaCas9KKH351 | exon79 | SaCas9KKH | − | GTTATAAAGAAAGATTGTAAAC | TAAAGT |
| 3046 | E79SaCas9KKH352 | exon79 | SaCas9KKH | − | AAAATTTATAACAGTTATAAAG | AAAGAT |
| 3047 | E79SaCas9KKH353 | exon79 | SaCas9KKH | − | TTTGGGTTGTTTAAAAATTTAT | AACAGT |
| 3048 | E79SaCas9KKH354 | exon79 | SaCas9KKH | − | TGGAACGCATTTTGGGTTGTTT | AAAAAT |
| 3049 | E79SaCas9KKH355 | exon79 | SaCas9KKH | − | ATTTCTTTATATGGAACGCATT | TTGGGT |
| 3050 | E79SaCas9KKH356 | exon79 | SaCas9KKH | − | ACTACATGTAAAATCTTGATAG | CTAAAT |
| 3051 | E79SaCas9KKH357 | exon79 | SaCas9KKH | − | ATAAGAAAACTACATGTAAAAT | CTTGAT |
| 3052 | E79SaCas9KKH358 | exon79 | SaCas9KKH | − | AAAGTTATAAGAAAACTACATG | TAAAAT |
| 3053 | E79SaCas9KKH359 | exon79 | SaCas9KKH | − | ACACGTCTATGCAATTGTACAA | AAAAGT |
| 3054 | E79SaCas9KKH360 | exon79 | SaCas9KKH | − | AATGGCAGGTTTTACACGTCTA | TGCAAT |
| 3055 | E79SaCas9KKH361 | exon79 | SaCas9KKH | − | TGTTATTGTTTTGTTAACAATG | GCAGGT |
| 3056 | E79SaCas9KKH362 | exon79 | SaCas9KKH | − | CTAAGTCTGTTATTGTTTTGTT | AACAAT |
| 3057 | E79SaCas9KKH363 | exon79 | SaCas9KKH | − | ATACTGTAGATTTCAGTAGTTT | CTAAGT |
| 3058 | E79SaCas9KKH364 | exon79 | SaCas9KKH | − | GTGGTATTATACTGTAGATTTC | AGTAGT |
| 3059 | E79SaCas9KKH365 | exon79 | SaCas9KKH | − | GTAGTGGTATTATACTGTAGAT | TTCAGT |
| 3060 | E79SaCas9KKH366 | exon79 | SaCas9KKH | − | TGAAGGGTAGTGGTATTATACT | GTAGAT |
| 3061 | E79SaCas9KKH367 | exon79 | SaCas9KKH | − | AATCTATATTTTTGTGAAGGGT | AGTGGT |
| 3062 | E79SaCas9KKH368 | exon79 | SaCas9KKH | − | ATAAATCTATATTTTTGTGAAG | GGTAGT |
| 3063 | E79SaCas9KKH369 | exon79 | SaCas9KKH | − | GAAATAAATCTATATTTTTGTG | AAGGGT |
| 3064 | E79SaCas9KKH370 | exon79 | SaCas9KKH | | AGACAGTAAGAGTTTACAAGAA | ATAAAT |
| 3065 | E79SaCas9KKH371 | exon79 | SaCas9KKH | − | GATTAGACAGTAAGAGTTTACA | AGAAAT |
| 3066 | E79SaCas9KKH372 | exon79 | SaCas9KKH | − | ACAACAAAGAGGATTAGACAGT | AAGAGT |
| 3067 | E79SaCas9KKH373 | exon79 | SaCas9KKH | − | ATTCATACAACAAAGAGGATTA | GACAGT |
| 3068 | E79SaCas9KKH374 | exon79 | SaCas9KKH | − | TTTATAATATTCATACAACAAA | GAGGAT |
| 3069 | E79SaCas9KKH375 | exon79 | SaCas9KKH | − | CTCCTGATTCCCGCATGGTTTT | TATAAT |
| 3070 | E79SaCas9KKH376 | exon79 | SaCas9KKH | − | GTTTTACAACTCCTGATTCCCG | CATGGT |
| 3071 | E79SaCas9KKH377 | exon79 | SaCas9KKH | − | GCAGAATAAATGTTTTACAACT | CCTGAT |
| 3072 | E79SaCas9KKH378 | exon79 | SaCas9KKH | − | TGACAGATGAAGAAGGAGCAGA | ATAAAT |
| 3073 | E79SaCas9KKH379 | exon79 | SaCas9KKH | − | GTCATGACAGATGAAGAAGGAG | CAGAAT |
| 3074 | E79SaCas9KKH380 | exon79 | SaCas9KKH | − | GGAGTCCTTAGTATCAGTCATG | ACAGAT |
| 3075 | E79SaCas9KKH381 | exon79 | SaCas9KKH | − | GCAGAGCGATGGAGTCCTTAGT | ATCAGT |
| 3076 | E79SaCas9KKH382 | exon79 | SaCas9KKH | − | ATTTGGGCAGAGCGATGGAGTC | CTTAGT |
| 3077 | E79SaCas9KKH383 | exon79 | SaCas9KKH | − | GCAGATGATTTGGGCAGAGCGA | TGGAGT |
| 3078 | E79SaCas9KKH384 | exon79 | SaCas9KKH | − | ACATGGCAGATGATTTGGGCAG | AGCGAT |
| 3079 | E79SaCas9KKH385 | exon79 | SaCas9KKH | − | AGGAAGTCTTTTCCACATGGCA | GATGAT |
| 3080 | E79SaCas9KKH386 | exon79 | SaCas9KKH | − | TGTAGGAAGTCTTTTCCACATG | GCAGAT |
| 3081 | E79SaCas9KKH387 | exon79 | SaCas9KKH | − | TTGTTTTCCAGGACACAATGTA | GGAAGT |

TABLE 1B
Slu guide sequences (human-hg38.12)

| Seq | Guide ID or | exon_ | | | | |
|---|---|---|---|---|---|---|
| ID No. | Guide RNA Name | id | enzyme | strand | Guide Sequence | pam |
| 4000 | E1Slu1 | exon1 | SluCas9 | + | AGCATTTTGAAAAGTGTATATC | AAGG |
| 4001 | E1Slu2 | exon1 | SluCas9 | + | TCAAGGCAGCGATAAAAAAAAC | CTGG |
| 4002 | E1Slu3 | exon1 | SluCas9 | + | TCTTCAAACTTTATTGCTCCAG | TAGG |
| 4003 | E1Slu4 | exon1 | SluCas9 | + | TTTTCCTATTCGTTTTTCTCCG | AAGG |
| 4004 | E1Slu5 | exon1 | SluCas9 | + | TGCCTCCCAGATCTGAGTCCTG | TAGG |
| 4005 | E1Slu6 | exon1 | SluCas9 | + | GCCTCCCAGATCTGAGTCCTGT | AGGG |
| 4006 | E1Slu7 | exon1 | SluCas9 | + | CCTCCCAGATCTGAGTCCTGTA | GGGG |
| 4007 | E1Slu8 | exon1 | SluCas9 | + | CTCCCAGATCTGAGTCCTGTAG | GGGG |
| 4008 | E1Slu9 | exon1 | SluCas9 | − | AATGCTTTGGTGGGAAGAAGTA | GAGG |
| 4009 | E1Slu10 | exon1 | SluCas9 | − | TACACTTTTCAAAATGCTTTGG | TGGG |
| 4010 | E1Slu11 | exon1 | SluCas9 | − | ATACACTTTTCAAAATGCTTTG | GTGG |
| 4011 | E1Slu12 | exon1 | SluCas9 | − | GATATACACTTTTCAAAATGCT | TTGG |
| 4012 | E1Slu13 | exon1 | SluCas9 | − | ATAAAGTTTGAAGAACTTTTAC | CAGG |
| 4013 | E1Slu14 | exon1 | SluCas9 | − | TTTCTCATTGTTTTTAAGCCTA | CTGG |
| 4014 | E1Slu15 | exon1 | SluCas9 | − | TTTTTAAAGCTGCTGAAGTTTG | TTGG |
| 4015 | E1Slu16 | exon1 | SluCas9 | − | ATTACCTTCGGAGAAAAACGAA | TAGG |
| 4016 | E1Slu17 | exon1 | SluCas9 | − | CAGATCTGGGAGGCAATTACCT | TCGG |
| 4017 | E1Slu18 | exon1 | SluCas9 | − | CCCCTACAGGACTCAGATCTGG | GAGG |
| 4018 | E1Slu19 | exon1 | SluCas9 | − | TTCCCCCTACAGGACTCAGATC | TGGG |
| 4019 | E1Slu20 | exon1 | SluCas9 | − | TTTCCCCCTACAGGACTCAGAT | CTGG |
| 4020 | E1Slu21 | exon1 | SluCas9 | − | GGGATCACTCACTTTCCCCCTA | CAGG |
| 4021 | E2Slu3 | exon2 | SluCas9 | − | ATGGGTAAATGCACAATTTTCT | AAGG |
| 4022 | E2Slu4 | exon2 | SluCas9 | − | TCAAAAGAAAACATTCACAAAA | TGGG |
| 4023 | E2Slu5 | exon2 | SluCas9 | − | TTCAAAAGAAAACATTCACAAA | ATGG |
| 4024 | E3Slu1 | exon3 | SluCas9 | + | CACATACCAGTTTTTGCCCTGT | CAGG |
| 4025 | E3Slu2 | exon3 | SluCas9 | + | GTTTTTGCCCTGTCAGGCCTTC | GAGG |
| 4026 | E3Slu3 | exon3 | SluCas9 | + | TTTGCCCTGTCAGGCCTTCGAG | GAGG |
| 4027 | E3Slu4 | exon3 | SluCas9 | + | CTGTCAGGCCTTCGAGGAGGTC | TAGG |
| 4028 | E3Slu5 | exon3 | SluCas9 | + | TCAGGCCTTCGAGGAGGTCTAG | GAGG |
| 4029 | E3Slu6 | exon3 | SluCas9 | + | CTAGGAGGCGCCTCCCATCCTG | TAGG |
| 4030 | E3Slu7 | exon3 | SluCas9 | + | TCCCATCCTGTAGGTCACTGAA | GAGG |
| 4031 | E3Slu8 | exon3 | SluCas9 | − | CGAAGGCCTGACAGGGCAAAAA | CTGG |
| 4032 | E3Slu9 | exon3 | SluCas9 | − | TAGACCTCCTCGAAGGCCTGAC | AGGG |
| 4033 | E3Slu10 | exon3 | SluCas9 | − | CTAGACCTCCTCGAAGGCCTGA | CAGG |
| 4034 | E3Slu11 | exon3 | SluCas9 | − | AGGCGCCTCCTAGACCTCCTCG | AAGG |
| 4035 | E3Slu12 | exon3 | SluCas9 | − | TCTTCAGTGACCTACAGGATGG | GAGG |
| 4036 | E3Slu13 | exon3 | SluCas9 | − | ACCTCTTCAGTGACCTACAGGA | TGGG |
| 4037 | E3Slu14 | exon3 | SluCas9 | − | AACCTCTTCAGTGACCTACAGG | ATGG |
| 4038 | E3Slu15 | exon3 | SluCas9 | − | TGAGAACCTCTTCAGTGACCTA | CAGG |
| 4039 | E4Slu1 | exon4 | SluCas9 | + | GCAGTGCCTTGTTGACATTGTT | CAGG |
| 4040 | E4Slu2 | exon4 | SluCas9 | + | CAGTGCCTTGTTGACATTGTTC | AGGG |
| 4041 | E4Slu3 | exon4 | SluCas9 | + | ATTGTTCAGGGCATGAACTCTT | GTGG |
| 4042 | E4Slu4 | exon4 | SluCas9 | + | ACTCTTGTGGATCCTTTTTCTT | TTGG |
| 4043 | E4Slu8 | exon4 | SluCas9 | − | GAACAATGTCAACAAGGCACTG | CGGG |
| 4044 | E4Slu9 | exon4 | SluCas9 | − | TGAACAATGTCAACAAGGCACT | GCGG |
| 4045 | E4Slu10 | exon4 | SluCas9 | − | TCATGCCCTGAACAATGTCAAC | AAGG |
| 4046 | E4Slu11 | exon4 | SluCas9 | − | TTTTGTTCTCAGCCAAAAGAAA | AAGG |
| 4047 | E5Slu1 | exon5 | SluCas9 | + | TCATCAGGATTCTTACCTGCCA | GTGG |
| 4048 | E5Slu2 | exon5 | SluCas9 | + | TCAGGATTCTTACCTGCCAGTG | GAGG |
| 4049 | E5Slu10 | exon5 | SluCas9 | − | TTGGAATATAATCCTCCACTGG | CAGG |
| 4050 | E5Slu11 | exon5 | SluCas9 | − | TGATTTGGAATATAATCCTCCA | CTGG |
| 4051 | E5Slu12 | exon5 | SluCas9 | − | ATAAACTGACTCTTGGTTTGAT | TTGG |
| 4052 | E5Slu13 | exon5 | SluCas9 | − | GATGGAAATCATAAACTGACTC | TTGG |
| 4053 | E5Slu14 | exon5 | SluCas9 | − | ATTGGAAGTACTGACATCGTAG | ATGG |
| 4054 | E5Slu15 | exon5 | SluCas9 | − | TAACAGGTTGATTTAGTGAATA | TTGG |
| 4055 | E6Slu1 | exon6 | SluCas9 | + | AGTAATCTTCTTACCTATGACT | ATGG |
| 4056 | E6Slu2 | exon6 | SluCas9 | + | TATGGATGAGAGCATTCAAAGC | CAGG |
| 4057 | E6Slu3 | exon6 | SluCas9 | + | CAAAGCCAGGCCATCAGACCAG | CTGG |
| 4058 | E6Slu4 | exon6 | SluCas9 | + | AGCCAGGCCATCAGACCAGCTG | GTGG |
| 4059 | E6Slu5 | exon6 | SluCas9 | + | GTGAAGTTGATTACATTAACCT | GTGG |
| 4060 | E6Slu6 | exon6 | SluCas9 | + | GTGGATAATTACGAGTTGATTG | TCGG |
| 4061 | E6Slu7 | exon6 | SluCas9 | + | GAGTTGATTGTCGGACCCAGCT | CAGG |
| 4062 | E6Slu8 | exon6 | SluCas9 | + | GCTCAGGAGAATCTTTTCACTG | TTGG |
| 4063 | E6Slu10 | exon6 | SluCas9 | − | TGAATGCTCTCATCCATAGTCA | TAGG |
| 4064 | E6Slu11 | exon6 | SluCas9 | − | CACCACCAGCTGGTCTGATGGC | CTGG |
| 4065 | E6Slu12 | exon6 | SluCas9 | − | AACTTCACCACCAGCTGGTCTG | ATGG |
| 4066 | E6Slu13 | exon6 | SluCas9 | − | ATGTAATCAACTTCACCACCAG | CTGG |
| 4067 | E6Slu14 | exon6 | SluCas9 | − | ACAATCAACTCGTAATTATCCA | CAGG |
| 4068 | E6Slu15 | exon6 | SluCas9 | − | CAGTGAAAAGATTCTCCTGAGC | TGGG |
| 4069 | E6Slu16 | exon6 | SluCas9 | − | ACAGTGAAAAGATTCTCCTGAG | CTGG |
| 4070 | E6Slu17 | exon6 | SluCas9 | − | AATGTAATGAAAAATATCATGG | CTGG |
| 4071 | E6Slu18 | exon6 | SluCas9 | − | CAAAAATGTAATGAAAAATATC | ATGG |
| 4072 | E7Slu1 | exon7 | SluCas9 | + | AGTCCAGAAATTTACCAACCTT | CAGG |
| 4073 | E7Slu2 | exon7 | SluCas9 | + | TTTCTCTATGCCTAATTGATAT | CTGG |
| 4074 | E7Slu3 | exon7 | SluCas9 | + | GAATGCATGTTCCAGTCGTTGT | GTGG |
| 4075 | E7Slu4 | exon7 | SluCas9 | + | CCAGTCGTTGTGTGGCTGACTG | CTGG |
| 4076 | E7Slu5 | exon7 | SluCas9 | + | AAACCACACTATTCCAGTCAAA | TAGG |
| 4077 | E7Slu6 | exon7 | SluCas9 | + | ACACTATTCCAGTCAAATAGGT | CTGG |
| 4078 | E7Slu8 | exon7 | SluCas9 | − | AGAAACTACTCGATCCTGAAGG | TTGG |
| 4079 | E7Slu9 | exon7 | SluCas9 | − | ATAGAGAAACTACTCGATCCTG | AAGG |
| 4080 | E7Slu10 | exon7 | SluCas9 | − | TTCAACATCGCCAGATATCAAT | TAGG |
| 4081 | E7Slu11 | exon7 | SluCas9 | − | CCAGCAGTCAGCCACACAACGA | CTGG |
| 4082 | E7Slu12 | exon7 | SluCas9 | − | AGACCTATTTGACTGGAATAGT | GTGG |
| 4083 | E7Slu13 | exon7 | SluCas9 | − | GTTTTAGGCCAGACCTATTTGA | CTGG |
| 4084 | E8Slu1 | exon8 | SluCas9 | + | AAATGTTCTTCTTTAGTCACTT | TAGG |
| 4085 | E8Slu2 | exon8 | SluCas9 | + | TGTTCTTCTTTAGTCACTTTAG | GTGG |
| 4086 | E8Slu3 | exon8 | SluCas9 | + | TCTTTAGTCACTTTAGGTGGCC | TTGG |
| 4087 | E8Slu4 | exon8 | SluCas9 | + | GCCTTGGCAACATTTCCACTTC | CTGG |
| 4088 | E8Slu5 | exon8 | SluCas9 | + | TGGCAACATTTCCACTTCCTGG | ATGG |
| 4089 | E8Slu6 | exon8 | SluCas9 | + | ATGGCTTCAATGCTCACTTGTT | GAGG |
| 4090 | E8Slu7 | exon8 | SluCas9 | + | TGCTCACTTGTTGAGGCAAAAC | TTGG |
| 4091 | E8Slu8 | exon8 | SluCas9 | 1 | GAGTGATGTGATGTACATTAAG | ATGG |
| 4092 | E8Slu9 | exon8 | SluCas9 | + | TACATTAAGATGGACTTCTTAT | CTGG |
| 4093 | E8Slu10 | exon8 | SluCas9 | + | TAAGATGGACTTCTTATCTGGA | TAGG |
| 4094 | E8Slu11 | exon8 | SluCas9 | + | GATGGACTTCTTATCTGGATAG | GTGG |
| 4095 | E8Slu13 | exon8 | SluCas9 | − | TCATCAAATGCACTATTCTCAA | CAGG |
| 4096 | E8Slu14 | exon8 | SluCas9 | − | TCCAGGAAGTGGAAATGTTGCC | AAGG |
| 4097 | E8Slu15 | exon8 | SluCas9 | − | GAGCATTGAAGCCATCCAGGAA | GTGG |
| 4098 | E8Slu16 | exon8 | SluCas9 | − | ACAAGTGAGCATTGAAGCCATC | CAGG |
| 4099 | E9Slu1 | exon9 | SluCas9 | + | AGTAAATGTTGACAGACCTGTG | AAGG |
| 4100 | E9Slu2 | exon9 | SluCas9 | + | TGTTGACAGACCTGTGAAGGAA | ATGG |
| 4101 | E9Slu3 | exon9 | SluCas9 | + | GTTGACAGACCTGTGAAGGAAA | TGGG |
| 4102 | E9Slu4 | exon9 | SluCas9 | + | TGTGAAGGAAATGGGCTCCGTG | TAGG |
| 4103 | E9Slu5 | exon9 | SluCas9 | + | GTGAAGGAAATGGGCTCCGTGT | AGGG |
| 4104 | E9Slu6 | exon9 | SluCas9 | + | AAATGGGCTCCGTGTAGGGTCA | GAGG |
| 4105 | E9Slu7 | exon9 | SluCas9 | + | TGGGCTCCGTGTAGGGTCAGAG | GTGG |
| 4106 | E9Slu8 | exon9 | SluCas9 | + | GGTGACATAAGCAGCCTGTGTG | TAGG |
| 4107 | E9Slu9 | exon9 | SluCas9 | + | GTGTAGGCATAGCTCTTGAATC | GAGG |
| 4108 | E9Slu10 | exon9 | SluCas9 | + | GCATAGCTCTTGAATCGAGGCT | TAGG |
| 4109 | E9Slu11 | exon9 | SluCas9 | + | CATAGCTCTTGAATCGAGGCTT | AGGG |
| 4110 | E9Slu12 | exon9 | SluCas9 | + | ATAGCTCTTGAATCGAGGCTTA | GGGG |
| 4111 | E9Slu20 | exon9 | SluCas9 | − | TACACGGAGCCCATTTCCTTCA | CAGG |
| 4112 | E9Slu21 | exon9 | SluCas9 | − | ATGTCACCACCTCTGACCCTAC | ACGG |
| 4113 | E9Slu22 | exon9 | SluCas9 | − | ATTCAAGAGCTATGCCTACACA | CAGG |
| 4114 | E9Slu23 | exon9 | SluCas9 | − | CAGATCACGGTCAGTCTAGCAC | AGGG |
| 4115 | E9Slu24 | exon9 | SluCas9 | − | GCAGATCACGGTCAGTCTAGCA | CAGG |
| 4116 | E9Slu25 | exon9 | SluCas9 | − | CCCAAACCCTTCTCTGCAGATC | ACGG |
| 4117 | E10Slu1 | exon10 | SluCas9 | + | AGTTTACCTCATGAGTATGAAA | CTGG |
| 4118 | E10Slu2 | exon10 | SluCas9 | + | CTTCTTCTAAAGCTGTTTGATA | ACGG |
| 4119 | E10Slu3 | exon10 | SluCas9 | + | CTAAAGCTGTTTGATAACGGTC | CAGG |
| 4120 | E10Slu4 | exon10 | SluCas9 | + | GAACTGCCAAATGACTTGTCTT | CAGG |
| 4121 | E10Slu7 | exon10 | SluCas9 | − | GAAAGACCAGTTTCATACTCAT | GAGG |
| 4122 | E10Slu8 | exon10 | SluCas9 | − | AGAGATTTCTAATGATGTGGAA | GTGG |
| 4123 | E10Slu9 | exon10 | SluCas9 | − | ACAAGGAGAGATTTCTAATGAT | GTGG |
| 4124 | E10Slu10 | exon10 | SluCas9 | − | GCTGAGGACACATTGCAAGCAC | AAGG |
| 4125 | E10Slu11 | exon10 | SluCas9 | − | ATTATCGTGGCTTCTTTCTGCT | GAGG |
| 4126 | E10Slu12 | exon10 | SluCas9 | − | CAGCTTTAGAAGAAGTATTATC | GTGG |
| 4127 | E10Slu13 | exon10 | SluCas9 | − | ATTGATGGAGAGTGAAGTAAAC | CTGG |
| 4128 | E10Slu14 | exon10 | SluCas9 | − | CAAGTCATTTGGCAGTTCATTG | ATGG |
| 4129 | E10Slu15 | exon10 | SluCas9 | − | GAAGCTCCTGAAGACAAGTCAT | TTGG |
| 4130 | E10Slu16 | exon10 | SluCas9 | − | AATTTATTTTATTGTGCAGCAT | TTGG |
| 4131 | E11Slu2 | exon11 | SluCas9 | + | GTTTTTCCATGCTAGCTACCCT | GAGG |
| 4132 | E11Slu3 | exon11 | SluCas9 | + | TGAGGCATTCCCATCTTGAATT | TAGG |
| 4133 | E11Slu4 | exon11 | SluCas9 | + | CCAATTGTAGAATATTACCAAC | CCGG |
| 4134 | E11Slu5 | exon11 | SluCas9 | + | GAATATTACCAACCCGGCCCTG | ATGG |
| 4135 | E11Slu6 | exon11 | SluCas9 | + | AATATTACCAACCCGGCCCTGA | TGGG |
| 4136 | E11Slu8 | exon11 | SluCas9 | − | GGAATGCCTCAGGGTAGCTAGC | ATGG |
| 4137 | E11Slu9 | exon11 | SluCas9 | − | AAATTCAAGATGGGAATGCCTC | AGGG |
| 4138 | E11Slu10 | exon11 | SluCas9 | − | TAAATTCAAGATGGGAATGCCT | CAGG |
| 4139 | E11Slu11 | exon11 | SluCas9 | − | GATGAATCTCCTAAATTCAAGA | TGGG |
| 4140 | E11Slu12 | exon11 | SluCas9 | − | AGATGAATCTCCTAAATTCAAG | ATGG |
| 4141 | E11Slu13 | exon11 | SluCas9 | − | TTGGGAAGTAAGCTGATTGGAA | CAGG |
| 4142 | E11Slu14 | exon11 | SluCas9 | − | CTACAATTGGGAAGTAAGCTGA | TTGG |
| 4143 | E11Slu15 | exon11 | SluCas9 | − | CGGGTTGGTAATATTCTACAAT | TGGG |
| 4144 | E11Slu16 | exon11 | SluCas9 | − | CCGGGTTGGTAATATTCTACAA | TTGG |
| 4145 | E11Slu17 | exon11 | SluCas9 | − | TTGACAGCCCATCAGGGCCGGG | TTGG |
| 4146 | E11Slu18 | exon11 | SluCas9 | − | GGATTTGACAGCCCATCAGGGC | CGGG |
| 4147 | E11Slu19 | exon11 | SluCas9 | − | TGGATTTGACAGCCCATCAGGG | CCGG |
| 4148 | E11Slu20 | exon11 | SluCas9 | − | ATGATGGATTTGACAGCCCATC | AGGG |
| 4149 | E11Slu21 | exon11 | SluCas9 | − | CATGATGGATTTGACAGCCCAT | CAGG |
| 4150 | E11Slu22 | exon11 | SluCas9 | − | CCTTCTTTGTCAGGGGTACATG | ATGG |
| 4151 | E12Slu1 | exon12 | SluCas9 | + | CACCTACCTTATGTTGTTGTAC | TTGG |
| 4152 | E12Slu2 | exon12 | SluCas9 | + | TATGTTGTTGTACTTGGCGTTT | TAGG |
| 4153 | E12Slu3 | exon12 | SluCas9 | + | TGGCGTTTTAGGTCTTCAAGAT | CAGG |
| 4154 | E12Slu4 | exon12 | SluCas9 | + | AGGTCTTCAAGATCAGGTCCAA | GAGG |
| 4155 | E12Slu5 | exon12 | SluCas9 | + | TCAACTCTTTCAGTTTCTGATT | CTGG |
| 4156 | E12Slu6 | exon12 | SluCas9 | − | CGCCAAGTACAACAACATAAGG | TAGG |
| 4157 | E12Slu7 | exon12 | SluCas9 | − | AAAACGCCAAGTACAACAACAT | AAGG |
| 4158 | E12Slu8 | exon12 | SluCas9 | − | AGGAAAATGGAGGAAGAGCCTC | TTGG |
| 4159 | E12Slu9 | exon12 | SluCas9 | − | AGAAGAAAGAACAAGGAAAATG | GAGG |
| 4160 | E12Slu10 | exon12 | SluCas9 | − | AACAGAAGAAAGAACAAGGAAA | ATGG |
| 4161 | E12Slu11 | exon12 | SluCas9 | − | TAACAAAAACAGAAGAAAGAAC | AAGG |
| 4162 | E12Slu12 | exon12 | SluCas9 | − | AGAAACTGAAAGAGTTGAATGA | CTGG |
| 4163 | E12Slu13 | exon12 | SluCas9 | − | TTTCAGTTTACATAGAGTTTTA | ATGG |
| 4164 | E13Slu2 | exon13 | SluCas9 | − | TGCTGCTTTGGAAGAACAACTT | AAGG |
| 4165 | E13Slu3 | exon13 | SluCas9 | − | TGGAGATCACGCAACTGCTGCT | TTGG |
| 4166 | E13Slu4 | exon13 | SluCas9 | − | GTGGTGGTAGTTGATGAATCTA | GTGG |
| 4167 | E13Slu5 | exon13 | SluCas9 | − | CAATTCTCTCACTCACATGGTG | GTGG |
| 4168 | E13Slu6 | exon13 | SluCas9 | − | GGTCAATTCTCTCACTCACATG | GTGG |
| 4169 | E13Slu7 | exon13 | SluCas9 | − | CAGGGTCAATTCTCTCACTCAC | ATGG |
| 4170 | E13Slu8 | exon13 | SluCas9 | − | AGATCTAGAACAAGAACAAGTC | AGGG |
| 4171 | E13Slu9 | exon13 | SluCas9 | − | AAGATCTAGAACAAGAACAAGT | CAGG |
| 4172 | E14Slu1 | exon14 | SluCas9 | + | CAGTAAGACGTTGCCATTTGAG | AAGG |
| 4173 | E14Slu2 | exon14 | SluCas9 | + | GGATGTCTTGTAAAAGAACCCA | GCGG |
| 4174 | E14Slu3 | exon14 | SluCas9 | + | TTGCCCATCGATCTCCCAATAC | CTGG |
| 4175 | E14Slu4 | exon14 | SluCas9 | − | ATGGCAACGTCTTACTGAAGAA | CAGG |
| 4176 | E14Slu5 | exon14 | SluCas9 | − | TTTTACAAGACATCCTTCTCAA | ATGG |
| 4177 | E14Slu6 | exon14 | SluCas9 | − | CTGTAGATGGACAGAAGACCGC | TGGG |
| 4178 | E14Slu7 | exon14 | SluCas9 | − | TCTGTAGATGGACAGAAGACCG | CTGG |
| 4179 | E14Slu8 | exon14 | SluCas9 | − | ATCGATGGGCAAACATCTGTAG | ATGG |
| 4180 | E14Slu9 | exon14 | SluCas9 | − | TCTCCAGGTATTGGGAGATCGA | TGGG |
| 4181 | E14Slu10 | exon14 | SluCas9 | − | TTCTCCAGGTATTGGGAGATCG | ATGG |
| 4182 | E14Slu11 | exon14 | SluCas9 | − | TGATTGTCTCTTCTCCAGGTAT | TGGG |
| 4183 | E14Slu12 | exon14 | SluCas9 | − | TTGATTGTCTCTTCTCCAGGTA | TTGG |
| 4184 | E15Slu2 | exon15 | SluCas9 | + | TTTCTGAAAGCCATGCACTAAA | AAGG |
| 4185 | E15Slu5 | exon15 | SluCas9 | − | AATGTTATCAAGTCTTCAAAAA | CTGG |
| 4186 | E15Slu6 | exon15 | SluCas9 | − | GCAGTGAACAAGATTCACACAA | CTGG |
| 4187 | E15Slu7 | exon15 | SluCas9 | − | TCTTGCAGTGCCTTTTTAGTGC | ATGG |
| 4188 | E16Slu1 | exon16 | SluCas9 | + | GTGCTGTACTCTTTTCAAGTTT | TTGG |
| 4189 | E16Slu2 | exon16 | SluCas9 | + | TTTGGACTAAATTATCCCAACA | CCGG |
| 4190 | E16Slu3 | exon16 | SluCas9 | + | TTGGACTAAATTATCCCAACAC | CGGG |
| 4191 | E16Slu4 | exon16 | SluCas9 | + | TATCCAGCCATGCTTCCGTCTT | CTGG |
| 4192 | E16Slu5 | exon16 | SluCas9 | + | ATCCAGCCATGCTTCCGTCTTC | TGGG |
| 4193 | E16Slu6 | exon16 | SluCas9 | + | TTTGAGTGAATACAGTTTGCCC | ATGG |
| 4194 | E16Slu7 | exon16 | SluCas9 | − | AAAACTTGAAAAGAGTACAGCA | CAGG |
| 4195 | E16Slu8 | exon16 | SluCas9 | − | GCTGGATAACTTTGCCCGGTGT | TGGG |
| 4196 | E16Slu9 | exon16 | SluCas9 | − | GGCTGGATAACTTTGCCCGGTG | TTGG |
| 4197 | E16Slu10 | exon16 | SluCas9 | − | AAGCATGGCTGGATAACTTTGC | CCGG |
| 4198 | E16Slu11 | exon16 | SluCas9 | − | GACCCAGAAGACGGAAGCATGG | CTGG |
| 4199 | E16Slu12 | exon16 | SluCas9 | − | CAGTGACCCAGAAGACGGAAGC | ATGG |
| 4200 | E16Slu13 | exon16 | SluCas9 | − | GAATAAGTCAGTGACCCAGAAG | ACGG |
| 4201 | E16Slu14 | exon16 | SluCas9 | − | CTAGAAAAGAAAAAGCAATCCA | TGGG |
| 4202 | E16Slu15 | exon16 | SluCas9 | − | TCTAGAAAAGAAAAAGCAATCC | ATGG |
| 4203 | E16Slu16 | exon16 | SluCas9 | − | CTTGTTTTAACAGGTTTTAAAA | GCGG |
| 4204 | E17Slu1 | exon17 | SluCas9 | + | CCACAGTAATCTGCCTCTTCTT | TTGG |
| 4205 | E17Slu2 | exon17 | SluCas9 | + | CACAGTAATCTGCCTCTTCTTT | TGGG |
| 4206 | E17Slu3 | exon17 | SluCas9 | + | ACAGTAATCTGCCTCTTCTTTT | GGGG |
| 4207 | E17Slu4 | exon17 | SluCas9 | + | GTAATCTGCCTCTTCTTTTGGG | GAGG |
| 4208 | E17Slu5 | exon17 | SluCas9 | + | ATCTGCCTCTTCTTTTGGGGAG | GTGG |
| 4209 | E17Slu6 | exon17 | SluCas9 | + | TGCCTCTTCTTTTGGGGAGGTG | GTGG |
| 4210 | E17Slu7 | exon17 | SluCas9 | + | CTCTTCTTTTGGGGAGGTGGTG | GTGG |
| 4211 | E17Slu8 | exon17 | SluCas9 | + | GTTCCTCTTGAGCATGCTTTAC | CAGG |
| 4212 | E17Slu9 | exon17 | SluCas9 | + | CTTTACCAGGATCTGTTCCCTT | GTGG |
| 4213 | E17Slu10 | exon17 | SluCas9 | + | ATTACAGTTGTCTGTGTTAGTG | ATGG |
| 4214 | E17Slu11 | exon17 | SluCas9 | + | TGTCTGTGTTAGTGATGGCTGA | GTGG |
| 4215 | E17Slu12 | exon17 | SluCas9 | + | CTGTGTTAGTGATGGCTGAGTG | GTGG |
| 4216 | E17Slu14 | exon17 | SluCas9 | − | CTGTGGATTCTGAAATTAGGAA | AAGG |
| 4217 | E17Slu15 | exon17 | SluCas9 | − | AGATTACTGTGGATTCTGAAAT | TAGG |
| 4218 | E17Slu16 | exon17 | SluCas9 | − | CCAAAAGAAGAGGCAGATTACT | GTGG |
| 4219 | E17Slu17 | exon17 | SluCas9 | − | CACCACCACCTCCCCAAAAGAA | GAGG |
| 4220 | E17Slu18 | exon17 | SluCas9 | − | GATCCTGGTAAAGCATGCTCAA | GAGG |
| 4221 | E17Slu19 | exon17 | SluCas9 | − | GGTGACCACAAGGGAACAGATC | CTGG |
| 4222 | E17Slu20 | exon17 | SluCas9 | − | AACAGTAACTACGGTGACCACA | AGGG |
| 4223 | E17Slu21 | exon17 | SluCas9 | − | AAACAGTAACTACGGTGACCAC | AAGG |
| 4224 | E17Slu22 | exon17 | SluCas9 | − | AACTGTAATGGAAACAGTAACT | ACGG |
| 4225 | E17Slu23 | exon17 | SluCas9 | − | ATCACTAACACAGACAACTGTA | ATGG |
| 4226 | E17Slu24 | exon17 | SluCas9 | − | TCAATACTTCTCACAGATTTCA | CAGG |
| 4227 | E18Slu1 | exon18 | SluCas9 | + | TCCTTCCGAAAGATTGCAAATT | CAGG |
| 4228 | E18Slu2 | exon18 | SluCas9 | − | GACTTAAAAGAAAAAGTCAATG | TAGG |
| 4229 | E18Slu3 | exon18 | SluCas9 | − | GAATTTGCAATCTTTCGGAAGG | AAGG |
| 4230 | E18Slu4 | exon18 | SluCas9 | − | TCCTGAATTTGCAATCTTTCGG | AAGG |
| 4231 | E18Slu5 | exon18 | SluCas9 | − | AGAGTCCTGAATTTGCAATCTT | TCGG |
| 4232 | E18Slu6 | exon18 | SluCas9 | − | TTGATATAACTGAACTTCACAG | CTGG |
| 4233 | E19Slu1 | exon19 | SluCas9 | + | TACCATTCACCATCTGTTCCAC | CAGG |
| 4234 | E19Slu2 | exon19 | SluCas9 | + | ACCATTCACCATCTGTTCCACC | AGGG |
| 4235 | E19Slu3 | exon19 | SluCas9 | + | CACCAGGGCCTGAGCTGATCTG | CTGG |
| 4236 | E19Slu4 | exon19 | SluCas9 | + | CTTCTCAGCTTTTTCTCGCTCT | ATGG |
| 4237 | E19Slu5 | exon19 | SluCas9 | − | GCCCTGGTGGAACAGATGGTGA | ATGG |
| 4238 | E19Slu6 | exon19 | SluCas9 | − | AGCTCAGGCCCTGGTGGAACAG | ATGG |
| 4239 | E19Slu7 | exon19 | SluCas9 | − | CAGCAGATCAGCTCAGGCCCTG | GTGG |
| 4240 | E19Slu8 | exon19 | SluCas9 | − | TGCCAGCAGATCAGCTCAGGCC | CTGG |
| 4241 | E19Slu9 | exon19 | SluCas9 | − | GCAAGATGCCAGCAGATCAGCT | CAGG |
| 4242 | E20Slu1 | exon20 | SluCas9 | + | TTTAACTGACTTTTAATTGCTG | TTGG |
| 4243 | E20Slu2 | exon20 | SluCas9 | + | CTTTTAATTGCTGTTGGCTCTG | ATGG |
| 4244 | E20Slu3 | exon20 | SluCas9 | + | TTTTAATTGCTGTTGGCTCTGA | TGGG |
| 4245 | E20Slu4 | exon20 | SluCas9 | + | TTTAATTGCTGTTGGCTCTGAT | GGGG |
| 4246 | E20Slu5 | exon20 | SluCas9 | + | AATTGCTGTTGGCTCTGATGGG | GTGG |
| 4247 | E20Slu6 | exon20 | SluCas9 | + | TGCTGTTGGCTCTGATGGGGTG | GTGG |
| 4248 | E20Slu7 | exon20 | SluCas9 | + | GCTGTTGGCTCTGATGGGGTGG | TGGG |
| 4249 | E20Slu8 | exon20 | SluCas9 | + | TTGGCTCTGATGGGGTGGTGGG | TTGG |
| 4250 | E20Slu9 | exon20 | SluCas9 | + | AGTTAAGTCTCTCACTTAGCAA | CTGG |
| 4251 | E20Slu10 | exon20 | SluCas9 | + | GCAACTGGCAGAATTCGATCCA | CCGG |
| 4252 | E20Slu11 | exon20 | SluCas9 | + | CCACCGGCTGTTCAGTTGTTCT | GAGG |
| 4253 | E20Slu13 | exon20 | SluCas9 | − | TAAAAGTCAGTTAAAAATTTGT | AAGG |
| 4254 | E20Slu14 | exon20 | SluCas9 | − | AGATGACAACTACTGCTGAAAA | CTGG |
| 4255 | E20Slu15 | exon20 | SluCas9 | − | TTTCTATAATCAGCTACAACAA | TTGG |
| 4256 | E20Slu16 | exon20 | SluCas9 | − | GCTAAGTGAGAGACTTAACTGG | CTGG |
| 4257 | E20Slu17 | exon20 | SluCas9 | − | AGTTGCTAAGTGAGAGACTTAA | CTGG |
| 4258 | E20Slu18 | exon20 | SluCas9 | − | CCTCAGAACAACTGAACAGCCG | GTGG |
| 4259 | E20Slu19 | exon20 | SluCas9 | − | AAGCCTCAGAACAACTGAACAG | CCGG |
| 4260 | E21Slu1 | exon21 | SluCas9 | + | ACTTGTCTGTAGCTCTTTCTCT | CTGG |
| 4261 | E21Slu2 | exon21 | SluCas9 | + | GACTTGCTTAAAATGATTTGTA | AAGG |
| 4262 | E21Slu3 | exon21 | SluCas9 | + | TAAAGGCCACAAAGTCTGCATC | CAGG |
| 4263 | E21Slu4 | exon21 | SluCas9 | + | CACAAAGTCTGCATCCAGGAAC | ATGG |
| 4264 | E21Slu5 | exon21 | SluCas9 | + | ACAAAGTCTGCATCCAGGAACA | TGGG |
| 4265 | E21Slu6 | exon21 | SluCas9 | + | TGGGTCCTTGTCCTTTCTCTTT | CAGG |
| 4266 | E21Slu7 | exon21 | SluCas9 | + | GGGTCCTTGTCCTTTCTCTTTC | AGGG |
| 4267 | E21Slu8 | exon21 | SluCas9 | + | TGAATTTTTAATCGTTCAATTT | GAGG |
| 4268 | E21Slu9 | exon21 | SluCas9 | + | TTTGAGGTTGAAGATCTGATAG | CCGG |
| 4269 | E21Slu12 | exon21 | SluCas9 | − | TAAGCAAGTCTTTTCTGATGTG | CAGG |
| 4270 | E21Slu13 | exon21 | SluCas9 | − | CATGTTCCTGGATGCAGACTTT | GTGG |
| 4271 | E21Slu14 | exon21 | SluCas9 | − | GAAAGGACAAGGACCCATGTTC | CTGG |
| 4272 | E21Slu15 | exon21 | SluCas9 | − | ATAGCCCTGAAAGAGAAAGGAC | AAGG |
| 4273 | E21Slu16 | exon21 | SluCas9 | − | CAAAGCATAGCCCTGAAAGAGA | AAGG |
| 4274 | E21Slu17 | exon21 | SluCas9 | − | CTATGGCACAGGATGAAGTCAA | CCGG |
| 4275 | E22Slu1 | exon22 | SluCas9 | + | TCTCTGCTCCATGATTTCATAG | TCGG |
| 4276 | E22Slu2 | exon22 | SluCas9 | + | TCATAGTCGGTGACACTAAGTT | GAGG |
| 4277 | E22Slu3 | exon22 | SluCas9 | + | GTCGGTGACACTAAGTTGAGGT | ATGG |
| 4278 | E22Slu4 | exon22 | SluCas9 | + | ACTAAGTTGAGGTATGGAGAGT | TTGG |
| 4279 | E22Slu5 | exon22 | SluCas9 | + | TGGAGAGTTTGGTTTCTGACTG | CTGG |
| 4280 | E22Slu6 | exon22 | SluCas9 | + | TGACTGCTGGACCCATGTCCTG | ATGG |
| 4281 | E22Slu7 | exon22 | SluCas9 | + | GACCCATGTCCTGATGGCACTC | ATGG |
| 4282 | E22Slu8 | exon22 | SluCas9 | + | CTCATGGTCTCCTGATAGCGCA | TTGG |
| 4283 | E22Slu9 | exon22 | SluCas9 | + | ATGGTCTCCTGATAGCGCATTG | GTGG |
| 4284 | E22Slu12 | exon22 | SluCas9 | − | GGAGCAGAGACTCGGGGAATTG | CAGG |
| 4285 | E22Slu13 | exon22 | SluCas9 | − | TGAAATCATGGAGCAGAGACTC | GGGG |
| 4286 | E22Slu14 | exon22 | SluCas9 | − | ATGAAATCATGGAGCAGAGACT | CGGG |
| 4287 | E22Slu15 | exon22 | SluCas9 | − | TATGAAATCATGGAGCAGAGAC | TCGG |
| 4288 | E22Slu16 | exon22 | SluCas9 | − | TAGTGTCACCGACTATGAAATC | ATGG |
| 4289 | E22Slu17 | exon22 | SluCas9 | − | GACCATGAGTGCCATCAGGACA | TGGG |
| 4290 | E22Slu18 | exon22 | SluCas9 | − | AGACCATGAGTGCCATCAGGAC | ATGG |
| 4291 | E22Slu19 | exon22 | SluCas9 | − | ATCAGGAGACCATGAGTGCCAT | CAGG |
| 4292 | E22Slu20 | exon22 | SluCas9 | − | CACTTTGCCACCAATGCGCTAT | CAGG |
| 4293 | E23Slu1 | exon23 | SluCas9 | + | AATCTTGAATTACCTGAATTTT | TCGG |
| 4294 | E23Slu2 | exon23 | SluCas9 | + | GCTTTTGACAATGCTCAACCAG | CTGG |
| 4295 | E23Slu3 | exon23 | SluCas9 | + | CTTTTGACAATGCTCAACCAGC | TGGG |
| 4296 | E23Slu4 | exon23 | SluCas9 | + | TTGACAATGCTCAACCAGCTGG | GAGG |
| 4297 | E23Slu5 | exon23 | SluCas9 | + | CTTCAAATTCTGATTGATATTT | CCGG |
| 4298 | E23Slu6 | exon23 | SluCas9 | + | TTGATATTTCCGGCTAATTTCA | GAGG |
| 4299 | E23Slu7 | exon23 | SluCas9 | + | TGATATTTCCGGCTAATTTCAG | AGGG |
| 4300 | E23Slu8 | exon23 | SluCas9 | + | TTTCTTCGACATCTCTTTCACA | GTGG |
| 4301 | E23Slu9 | exon23 | SluCas9 | + | TCACAGTGGTGCTGAGATAGTA | TAGG |
| 4302 | E23Slu10 | exon23 | SluCas9 | − | AATGAATAAACTCCGAAAAATT | CAGG |
| 4303 | E23Slu11 | exon23 | SluCas9 | − | GGTTGAGCATTGTCAAAAGCTA | GAGG |
| 4304 | E23Slu12 | exon23 | SluCas9 | − | CTGGAAGAAGCTCTCCTCCCAG | CTGG |
| 4305 | E23Slu13 | exon23 | SluCas9 | − | AATTTGAAGAAATTGAGGGACG | CTGG |
| 4306 | E23Slu14 | exon23 | SluCas9 | − | CAATCAGAATTTGAAGAAATTG | AGGG |
| 4307 | E23Slu15 | exon23 | SluCas9 | − | TCAATCAGAATTTGAAGAAATT | GAGG |
| 4308 | E23Slu16 | exon23 | SluCas9 | − | AGAAAGCGCCCTCTGAAATTAG | CCGG |
| 4309 | E23Slu17 | exon23 | SluCas9 | − | AGTTCTCTGCAAGAGCAACAAA | GTGG |
| 4310 | E24Slu1 | exon24 | SluCas9 | + | TTTTTAGAATTTCTGAATCCCC | AAGG |
| 4311 | E24Slu2 | exon24 | SluCas9 | + | TTTTAGAATTTCTGAATCCCCA | AGGG |
| 4312 | E24Slu3 | exon24 | SluCas9 | + | AGAATTTCTGAATCCCCAAGGG | CAGG |
| 4313 | E24Slu4 | exon24 | SluCas9 | + | CAACTTCAGCCATCCATTTCTT | CAGG |
| 4314 | E24Slu5 | exon24 | SluCas9 | + | AACTTCAGCCATCCATTTCTTC | AGGG |
| 4315 | E24Slu8 | exon24 | SluCas9 | − | GAAGGAGGAATGGCCTGCCCTT | GGGG |
| 4316 | E24Slu9 | exon24 | SluCas9 | − | TGAAGGAGGAATGGCCTGCCCT | TGGG |
| 4317 | E24Slu10 | exon24 | SluCas9 | − | CTGAAGGAGGAATGGCCTGCCC | TTGG |
| 4318 | E24Slu11 | exon24 | SluCas9 | − | TTGATGTTTTTCTGAAGGAGGA | ATGG |
| 4319 | E24Slu12 | exon24 | SluCas9 | − | TGAAGTTGATGTTTTTCTGAAG | GAGG |
| 4320 | E24Slu13 | exon24 | SluCas9 | − | GGCTGAAGTTGATGTTTTTCTG | AAGG |
| 4321 | E24Slu14 | exon24 | SluCas9 | − | CATACAAACCCTGAAGAAATGG | ATGG |
| 4322 | E24Slu15 | exon24 | SluCas9 | − | ATCACATACAAACCCTGAAGAA | ATGG |
| 4323 | E25Slu1 | exon25 | SluCas9 | + | TGAAAGAGATTGTCTATACCTG | TTGG |
| 4324 | E25Slu2 | exon25 | SluCas9 | + | GTCTCAAGTCTCGAAGCAAACT | CTGG |
| 4325 | E25Slu3 | exon25 | SluCas9 | + | ACCTTCATTGACACTGTTTAGA | CTGG |
| 4326 | E25Slu4 | exon25 | SluCas9 | + | CCTTCATTGACACTGTTTAGAC | TGGG |
| 4327 | E25Slu6 | exon25 | SluCas9 | − | TCAGTGGGATCACATGTGCCAA | CAGG |
| 4328 | E25Slu7 | exon25 | SluCas9 | − | ACTCAAAGAACTTAACACTCAG | TGGG |
| 4329 | E25Slu8 | exon25 | SluCas9 | − | AACTCAAAGAACTTAACACTCA | GTGG |
| 4330 | E25Slu9 | exon25 | SluCas9 | − | GTCTAAACAGTGTCAATGAAGG | TGGG |
| 4331 | E25Slu10 | exon25 | SluCas9 | − | AGTCTAAACAGTGTCAATGAAG | GTGG |
| 4332 | E25Slu11 | exon25 | SluCas9 | − | CCCAGTCTAAACAGTGTCAATG | AAGG |
| 4333 | E26Slu1 | exon26 | SluCas9 | + | TCAACTGCTTTCTGTAATTCAT | CTGG |
| 4334 | E26Slu2 | exon26 | SluCas9 | + | CGTGCATCTCTGATAGATCTTT | CTGG |
| 4335 | E26Slu3 | exon26 | SluCas9 | + | GCATCTCTGATAGATCTTTCTG | GAGG |
| 4336 | E26Slu4 | exon26 | SluCas9 | + | AGTTTTCTCCAAACCTCCCTTC | AAGG |
| 4337 | E26Slu5 | exon26 | SluCas9 | + | ACCTCCCTTCAAGGCCTCCTTT | CTGG |
| 4338 | E26Slu6 | exon26 | SluCas9 | − | ACAGAAAGCAGTTGAAGAGATG | AAGG |
| 4339 | E26Slu7 | exon26 | SluCas9 | − | AAGATCTATCAGAGATGCACGA | ATGG |
| 4340 | E26Slu8 | exon26 | SluCas9 | − | AAAGGAGGCCTTGAAGGGAGGT | TTGG |
| 4341 | E26Slu9 | exon26 | SluCas9 | − | GCCAGAAAGGAGGCCTTGAAGG | GAGG |
| 4342 | E26Slu10 | exon26 | SluCas9 | − | TATGCCAGAAAGGAGGCCTTGA | AGGG |
| 4343 | E26Slu11 | exon26 | SluCas9 | − | CTATGCCAGAAAGGAGGCCTTG | AAGG |
| 4344 | E26Slu12 | exon26 | SluCas9 | − | GTGGAAGGTCTATGCCAGAAAG | GAGG |
| 4345 | E26Slu13 | exon26 | SluCas9 | − | TTTGTGGAAGGTCTATGCCAGA | AAGG |
| 4346 | E27Slu1 | exon27 | SluCas9 | + | CATTCAGCCTAGTGCAGAGCCA | CTGG |
| 4347 | E27Slu2 | exon27 | SluCas9 | + | CCTAGTGCAGAGCCACTGGTAG | TTGG |
| 4348 | E27Slu3 | exon27 | SluCas9 | + | AGTGCAGAGCCACTGGTAGTTG | GTGG |
| 4349 | E27Slu4 | exon27 | SluCas9 | + | TAGAGTTTCAAGTTCCTTTTTT | AAGG |
| 4350 | E27Slu5 | exon27 | SluCas9 | + | TTTTTTAAGGCCTCTTGTGCTA | CAGG |
| 4351 | E27Slu6 | exon27 | SluCas9 | + | TTTAAGGCCTCTTGTGCTACAG | GTGG |
| 4352 | E27Slu7 | exon27 | SluCas9 | + | TGACACTATTTACAGACTCAGT | AAGG |
| 4353 | E27Slu8 | exon27 | SluCas9 | + | GTTTCACTTTCGCTTCTTTTTG | TTGG |
| 4354 | E27Slu9 | exon27 | SluCas9 | + | TTTCACTTTCGCTTCTTTTTGT | TGGG |
| 4355 | E27Slu11 | exon27 | SluCas9 | − | GCTGAATGGGAAATGCAAGACT | TTGG |
| 4356 | E27Slu12 | exon27 | SluCas9 | − | AGTGGCTCTGCACTAGGCTGAA | TGGG |
| 4357 | E27Slu13 | exon27 | SluCas9 | − | CAGTGGCTCTGCACTAGGCTGA | ATGG |
| 4358 | E27Slu14 | exon27 | SluCas9 | − | CCAACTACCAGTGGCTCTGCAC | TAGG |
| 4359 | E27Slu15 | exon27 | SluCas9 | − | AAACTCTAACCACCAACTACCA | GTGG |
| 4360 | E27Slu16 | exon27 | SluCas9 | − | TGTAGCACAAGAGGCCTTAAAA | AAGG |
| 4361 | E27Slu17 | exon27 | SluCas9 | − | TCAAGCTCCACCTGTAGCACAA | GAGG |
| 4362 | E27Slu18 | exon27 | SluCas9 | − | TATTTTTCAGAGAGCTAAAGAA | GAGG |
| 4363 | E28Slu1 | exon28 | SluCas9 | + | TCAGAGATTTCCTCAGCTCCGC | CAGG |
| 4364 | E28Slu2 | exon28 | SluCas9 | + | AGCTCCGCCAGGAATGTTTTCA | GTGG |
| 4365 | E28Slu3 | exon28 | SluCas9 | − | TGGCGGAGCTGAGGAAATCTCT | GAGG |
| 4366 | E28Slu4 | exon28 | SluCas9 | − | TGAAAACATTCCTGGCGGAGCT | GAGG |
| 4367 | E28Slu5 | exon28 | SluCas9 | − | AAAACCACTGAAAACATTCCTG | GCGG |
| 4368 | E28Slu6 | exon28 | SluCas9 | − | CTTAAAACCACTGAAAACATTC | CTGG |
| 4369 | E28Slu7 | exon28 | SluCas9 | − | CATACTTGGAGAAAGCAAACAA | GTGG |
| 4370 | E28Slu8 | exon28 | SluCas9 | − | TTGGCATGAGTTATTGTCATAC | TTGG |
| 4371 | E28Slu9 | exon28 | SluCas9 | − | TTTCTTAGGAAGTTTGGGCATG | TTGG |
| 4372 | E28Slu10 | exon28 | SluCas9 | − | TATATTTCTTTCTTAGGAAGTT | TGGG |
| 4373 | E28Slu11 | exon28 | SluCas9 | − | ATATATTTCTTTCTTAGGAAGT | TTGG |
| 4374 | E29Slu1 | exon29 | SluCas9 | + | CATCCATGACTCCGCCATCTGT | TAGG |
| 4375 | E29Slu2 | exon29 | SluCas9 | + | ATCCATGACTCCGCCATCTGTT | AGGG |
| 4376 | E29Slu3 | exon29 | SluCas9 | + | TGTGCCAATATGCGAATCTGAT | TTGG |
| 4377 | E29Slu4 | exon29 | SluCas9 | + | GTGCCAATATGCGAATCTGATT | TGGG |
| 4378 | E29Slu5 | exon29 | SluCas9 | − | TCGTTGGAGGGAACTACATGAA | GAGG |
| 4379 | E29Slu6 | exon29 | SluCas9 | − | TGAGACATTTAATTCTCGTTGG | AGGG |
| 4380 | E29Slu7 | exon29 | SluCas9 | − | TTGAGACATTTAATTCTCGTTG | GAGG |
| 4381 | E29Slu8 | exon29 | SluCas9 | − | AACTTGAGACATTTAATTCTCG | TTGG |
| 4382 | E29Slu9 | exon29 | SluCas9 | − | AGTCATGGATGAGCTAATCAAT | GAGG |
| 4383 | E29Slu10 | exon29 | SluCas9 | − | GACCCTAACAGATGGCGGAGTC | ATGG |
| 4384 | E29Slu11 | exon29 | SluCas9 | − | TTGGCACAGACCCTAACAGATG | GCGG |
| 4385 | E29Slu12 | exon29 | SluCas9 | − | ATATTGGCACAGACCCTAACAG | ATGG |
| 4386 | E29Slu13 | exon29 | SluCas9 | − | TAACCCAAATCAGATTCGCATA | TTGG |
| 4387 | E29Slu14 | exon29 | SluCas9 | − | TGAAAATTTGATGCGACATTCA | GAGG |
| 4388 | E30Slu3 | exon30 | SluCas9 | + | GATGTACTTGCCTGGGCTTCCT | GAGG |
| 4389 | E30Slu4 | exon30 | SluCas9 | + | CCAACTGCTTGTCAATGAATGT | GAGG |
| 4390 | E30Slu5 | exon30 | SluCas9 | + | CAACTGCTTGTCAATGAATGTG | AGGG |
| 4391 | E30Slu6 | exon30 | SluCas9 | + | TGTCAATGAATGTGAGGGACTC | CTGG |
| 4392 | E30Slu7 | exon30 | SluCas9 | + | GAGGGACTCCTGGATTAAGTGT | AAGG |
| 4393 | E30Slu8 | exon30 | SluCas9 | + | AGTGTAAGGATTTTTCAGTCTC | CTGG |
| 4394 | E30Slu9 | exon30 | SluCas9 | + | GTGTAAGGATTTTTCAGTCTCC | TGGG |
| 4395 | E30Slu10 | exon30 | SluCas9 | + | ATTTTTCAGTCTCCTGGGCAGA | CTGG |
| 4396 | E30Slu14 | exon30 | SluCas9 | − | AGCTCAAATGCCTCAGGAAGCC | CAGG |
| 4397 | E30Slu15 | exon30 | SluCas9 | − | GGTGGACGCAGCTCAAATGCCT | CAGG |
| 4398 | E30Slu16 | exon30 | SluCas9 | − | GGCAGCTTATATTGCAGACAAG | GTGG |
| 4399 | E30Slu17 | exon30 | SluCas9 | − | GTTGGCAGCTTATATTGCAGAC | AAGG |
| 4400 | E30Slu18 | exon30 | SluCas9 | − | CCTCACATTCATTGACAAGCAG | TTGG |
| 4401 | E30Slu19 | exon30 | SluCas9 | − | TGAAAAATCCTTACACTTAATC | CAGG |
| 4402 | E30Slu20 | exon30 | SluCas9 | − | TGAACAGAGCATCCAGTCTGCC | CAGG |
| 4403 | E30Slu21 | exon30 | SluCas9 | − | TTCCTTCTTTTTAGGCTGTAAG | GAGG |
| 4404 | E30Slu22 | exon30 | SluCas9 | − | TTATTCCTTCTTTTTAGGCTGT | AAGG |
| 4405 | E31Slu1 | exon31 | SluCas9 | + | CCTGTGCAACATCAATCTGAGA | CAGG |
| 4406 | E31Slu2 | exon31 | SluCas9 | + | CATCAATCTGAGACAGGACTCT | TTGG |
| 4407 | E31Slu3 | exon31 | SluCas9 | + | ATCAATCTGAGACAGGACTCTT | TGGG |
| 4408 | E31Slu4 | exon31 | SluCas9 | + | TCTCATGACTTGTCAAATCAGA | TTGG |
| 4409 | E31Slu5 | exon31 | SluCas9 | + | TCAAATCAGATTGGATTTTCTG | TTGG |
| 4410 | E31Slu9 | exon31 | SluCas9 | − | CCTGTCTCAGATTGATGTTGCA | CAGG |
| 4411 | E31Slu10 | exon31 | SluCas9 | − | GAAGAAACATAATCAGGGGAAG | GAGG |
| 4412 | E31Slu11 | exon31 | SluCas9 | − | AATGAAGAAACATAATCAGGGG | AAGG |
| 4413 | E31Slu12 | exon31 | SluCas9 | − | AAGAAATGAAGAAACATAATCA | GGGG |
| 4414 | E31Slu13 | exon31 | SluCas9 | − | GAAGAAATGAAGAAACATAATC | AGGG |
| 4415 | E31Slu14 | exon31 | SluCas9 | − | AGAAGAAATGAAGAAACATAAT | CAGG |
| 4416 | E32Slu1 | exon32 | SluCas9 | + | TCCACACTCTTTGTTTCCAATG | CAGG |
| 4417 | E32Slu2 | exon32 | SluCas9 | + | TTCTTGTAGACGCTGCTCAAAA | TTGG |
| 4418 | E32Slu3 | exon32 | SluCas9 | + | TGTAGACGCTGCTCAAAATTGG | CTGG |
| 4419 | E32Slu4 | exon32 | SluCas9 | + | GCTGCTCAAAATTGGCTGGTTT | CTGG |
| 4420 | E32Slu5 | exon32 | SluCas9 | + | TTTCTGGAATAATCGAAACTTC | ATGG |
| 4421 | E32Slu11 | exon32 | SluCas9 | − | ACAGTCACAGCTAAATCATTGT | GTGG |
| 4422 | E32Slu12 | exon32 | SluCas9 | − | ATTGGAAACAAAGAGTGTGGAA | CAGG |
| 4423 | E32Slu13 | exon32 | SluCas9 | − | GCCTGCATTGGAAACAAAGAGT | GTGG |
| 4424 | E32Slu14 | exon32 | SluCas9 | − | AGTGAAGATGCACTTGCCTGCA | TTGG |
| 4425 | E33Slu1 | exon33 | SluCas9 | + | TGTTACTCTTTCATCAAGTTCT | TTGG |
| 4426 | E33Slu2 | exon33 | SluCas9 | + | GTTACTCTTTCATCAAGTTCTT | TGGG |
| 4427 | E33Slu3 | exon33 | SluCas9 | − | GCATTATAATGAGCTGGGAGCA | AAGG |
| 4428 | E33Slu4 | exon33 | SluCas9 | − | TTGAAATTGCATTATAATGAGC | TGGG |
| 4429 | E33Slu5 | exon33 | SluCas9 | − | TTTGAAATTGCATTATAATGAG | CTGG |
| 4430 | E33Slu6 | exon33 | SluCas9 | − | TCAGATTGTACAGAAAAAGCAG | ACGG |
| 4431 | E33Slu7 | exon33 | SluCas9 | − | GAAGTGGAAATGGTGATAAAGA | CTGG |
| 4432 | E33Slu8 | exon33 | SluCas9 | − | TGAAGTGAAGTCTGAAGTGGAA | ATGG |
| 4433 | E33Slu9 | exon33 | SluCas9 | − | TCTGAGTGAAGTGAAGTCTGAA | GTGG |
| 4434 | E34Slu2 | exon34 | SluCas9 | + | TGATATAGGTTTTACCTTTCCC | CAGG |
| 4435 | E34Slu3 | exon34 | SluCas9 | + | GCAACTTCAGAATCCAAATTAC | TAGG |
| 4436 | E34Slu4 | exon34 | SluCas9 | + | CATTCATTTCCTTTCGCATCTT | ACGG |
| 4437 | E34Slu5 | exon34 | SluCas9 | + | ATTCATTTCCTTTCGCATCTTA | CGGG |
| 4438 | E34Slu7 | exon34 | SluCas9 | − | GGATTCTGAAGTTGCCTGGGGA | AAGG |
| 4439 | E34Slu8 | exon34 | SluCas9 | − | AATTTGGATTCTGAAGTTGCCT | GGGG |
| 4440 | E34Slu9 | exon34 | SluCas9 | − | TAATTTGGATTCTGAAGTTGCC | TGGG |
| 4441 | E34Slu10 | exon34 | SluCas9 | − | GTAATTTGGATTCTGAAGTTGC | CTGG |
| 4442 | E34Slu11 | exon34 | SluCas9 | − | AGTTGAAGGAATGCCTAGTAAT | TTGG |
| 4443 | E34Slu12 | exon34 | SluCas9 | − | TTGACAAAGAGATCAGCAGTTG | AAGG |
| 4444 | E34Slu13 | exon34 | SluCas9 | − | AGAATGGCTGGCAGCTACAGAT | ATGG |
| 4445 | E34Slu14 | exon34 | SluCas9 | − | AATGAATGTCTTGACAGAATGG | CTGG |
| 4446 | E34Slu15 | exon34 | SluCas9 | − | AGGAAATGAATGTCTTGACAGA | ATGG |
| 4447 | E34Slu16 | exon34 | SluCas9 | − | GAAATTGTCCCGTAAGATGCGA | AAGG |
| 4448 | E34Slu17 | exon34 | SluCas9 | − | GGTAACAGAAAGAAAGCAACAG | TTGG |
| 4449 | E35Slu1 | exon35 | SluCas9 | + | AAAGATTTAACCACTCTTCTGC | TCGG |
| 4450 | E35Slu2 | exon35 | SluCas9 | + | AAGATTTAACCACTCTTCTGCT | CGGG |
| 4451 | E35Slu3 | exon35 | SluCas9 | + | ATTTAACCACTCTTCTGCTCGG | GAGG |
| 4452 | E35Slu4 | exon35 | SluCas9 | + | CTTCTTGCCCAAAACTGTTTTC | AAGG |
| 4453 | E35Slu5 | exon35 | SluCas9 | + | CTCCTACCTCTGTGATACTCTT | CAGG |
| 4454 | E35Slu8 | exon35 | SluCas9 | − | AGAAGAGTGGTTAAATCTTTTG | TTGG |
| 4455 | E35Slu9 | exon35 | SluCas9 | − | CTGTCACCTCCCGAGCAGAAGA | GTGG |
| 4456 | E35Slu10 | exon35 | SluCas9 | − | AACTCAGTCTTCTGAATAGTAA | CTGG |
| 4457 | E35Slu11 | exon35 | SluCas9 | − | TTTGGGCAAGAAGGAGACGTTG | GTGG |
| 4458 | E35Slu12 | exon35 | SluCas9 | − | AGTTTTGGGCAAGAAGGAGACG | TTGG |
| 4459 | E35Slu13 | exon35 | SluCas9 | − | CTTGAAAACAGTTTTGGGCAAG | AAGG |
| 4460 | E35Slu14 | exon35 | SluCas9 | − | GGAGAGGCCTTGAAAACAGTTT | TGGG |
| 4461 | E35Slu15 | exon35 | SluCas9 | − | AGGAGAGGCCTTGAAAACAGTT | TTGG |
| 4462 | E35Slu16 | exon35 | SluCas9 | − | GAAGAGTATCACAGAGGTAGGA | GAGG |
| 4463 | E35Slu17 | exon35 | SluCas9 | − | CACCTGAAGAGTATCACAGAGG | TAGG |
| 4464 | E35Slu18 | exon35 | SluCas9 | − | GGTGCACCTGAAGAGTATCACA | GAGG |
| 4465 | E35Slu19 | exon35 | SluCas9 | − | TCAAAAAGAGATTGAGAAACAG | AAGG |
| 4466 | E36Slu1 | exon36 | SluCas9 | + | CCTTAAGCACGTCTTCTTTTTG | CTGG |
| 4467 | E36Slu2 | exon36 | SluCas9 | + | CTTAAGCACGTCTTCTTTTTGC | TGGG |
| 4468 | E36Slu3 | exon36 | SluCas9 | + | TTAAGCACGTCTTCTTTTTGCT | GGGG |
| 4469 | E36Slu4 | exon36 | SluCas9 | + | CCTGAATGATCCACTTTGTGAT | GTGG |
| 4470 | E36Slu5 | exon36 | SluCas9 | + | ACTTTGTGATGTGGTCCACATT | CTGG |
| 4471 | E36Slu6 | exon36 | SluCas9 | + | GGTCAAAAGTTTCCATGTGTTT | CTGG |
| 4472 | E36Slu8 | exon36 | SluCas9 | − | CCAGCAAAAAGAAGACGTGCTT | AAGG |
| 4473 | E36Slu9 | exon36 | SluCas9 | − | GATCATTCAGGCTGACACACTT | TTGG |
| 4474 | E36Slu10 | exon36 | SluCas9 | − | CCACATCACAAAGTGGATCATT | CAGG |
| 4475 | E36Slu11 | exon36 | SluCas9 | − | AGAATGTGGACCACATCACAAA | GTGG |
| 4476 | E36Slu12 | exon36 | SluCas9 | − | CATGGAAACTTTTGACCAGAAT | GTGG |
| 4477 | E36Slu13 | exon36 | SluCas9 | − | AATTAAGGAATACCAGAAACAC | ATGG |
| 4478 | E37Slu1 | exon37 | SluCas9 | + | TCCAGTCTTAATTCTGTGTGAA | ATGG |
| 4479 | E37Slu2 | exon37 | SluCas9 | + | TGTGTGAAATGGCTGCAAATCG | ATGG |
| 4480 | E37Slu3 | exon37 | SluCas9 | + | ATCGATGGTTGAGCTCTGAGAT | TTGG |
| 4481 | E37Slu4 | exon37 | SluCas9 | + | TCGATGGTTGAGCTCTGAGATT | TGGG |
| 4482 | E37Slu5 | exon37 | SluCas9 | + | CGATGGTTGAGCTCTGAGATTT | GGGG |
| 4483 | E37Slu6 | exon37 | SluCas9 | + | GGGGCTCTACTAATTTCCTGCA | GTGG |
| 4484 | E37Slu7 | exon37 | SluCas9 | + | CTAATTTCCTGCAGTGGTCACC | GCGG |
| 4485 | E37Slu8 | exon37 | SluCas9 | + | GGTTTGCCATCAAGTTTGCTGC | TTGG |
| 4486 | E37Slu9 | exon37 | SluCas9 | + | TGGTCACGTGTAGAGTCCACCT | TTGG |
| 4487 | E37Slu10 | exon37 | SluCas9 | + | GGTCACGTGTAGAGTCCACCTT | TGGG |
| 4488 | E37Slu14 | exon37 | SluCas9 | − | CACAGAATTAAGACTGGAAAGG | TAGG |
| 4489 | E37Slu15 | exon37 | SluCas9 | − | TTCACACAGAATTAAGACTGGA | AAGG |
| 4490 | E37Slu16 | exon37 | SluCas9 | − | GCCATTTCACACAGAATTAAGA | CTGG |
| 4491 | E37Slu17 | exon37 | SluCas9 | − | TGGCAAACCGCGGTGACCACTG | CAGG |
| 4492 | E37Slu18 | exon37 | SluCas9 | − | GCAGCAAACTTGATGGCAAACC | GCGG |
| 4493 | E37Slu19 | exon37 | SluCas9 | − | ACGTGACCAAGCAGCAAACTTG | ATGG |
| 4494 | E37Slu20 | exon37 | SluCas9 | − | ACTGAATGACATACGCCCAAAG | GTGG |
| 4495 | E37Slu21 | exon37 | SluCas9 | − | AGAACTGAATGACATACGCCCA | AAGG |
| 4496 | E37Slu22 | exon37 | SluCas9 | − | TGCTCATGGAATATAGCGTTTA | AAGG |
| 4497 | E38Slu1 | exon38 | SluCas9 | + | CCCTGCTGAATTTCAGCCTCCA | GTGG |
| 4498 | E38Slu2 | exon38 | SluCas9 | + | TTAAACTGCTCCAATTCCTTCA | AAGG |
| 4499 | E38Slu3 | exon38 | SluCas9 | + | CTGCTCCAATTCCTTCAAAGGA | ATGG |
| 4500 | E38Slu4 | exon38 | SluCas9 | + | CTCCAATTCCTTCAAAGGAATG | GAGG |
| 4501 | E38Slu6 | exon38 | SluCas9 | − | AGAGGAAGACTTCAATAAAGAT | ATGG |
| 4502 | E38Slu7 | exon38 | SluCas9 | − | TCAGCAGGGGGTGAATCTGAAA | GAGG |
| 4503 | E38Slu8 | exon38 | SluCas9 | − | ACTGGAGGCTGAAATTCAGCAG | GGGG |
| 4504 | E38Slu9 | exon38 | SluCas9 | − | CACTGGAGGCTGAAATTCAGCA | GGGG |
| 4505 | E38Slu10 | exon38 | SluCas9 | − | CCACTGGAGGCTGAAATTCAGC | AGGG |
| 4506 | E38Slu11 | exon38 | SluCas9 | − | ACCACTGGAGGCTGAAATTCAG | CAGG |
| 4507 | E38Slu12 | exon38 | SluCas9 | − | ACAAAAATTGCTTGAACCACTG | GAGG |
| 4508 | E38Slu13 | exon38 | SluCas9 | − | TATACAAAAATTGCTTGAACCA | CTGG |
| 4509 | E38Slu14 | exon38 | SluCas9 | − | GGCCTCCATTCCTTTGAAGGAA | TTGG |
| 4510 | E38Slu15 | exon38 | SluCas9 | − | TTTTTAGGCCTCCATTCCTTTG | AAGG |
| 4511 | E39Slu1 | exon39 | SluCas9 | − | ACAGACAAAACATAATGCTCTC | AAGG |
| 4512 | E39Slu2 | exon39 | SluCas9 | − | AATCACAGATGAGAGAAAGCGA | GAGG |
| 4513 | E39Slu3 | exon39 | SluCas9 | − | ACTGTAAAAGAATTGTTGCAAA | GAGG |
| 4514 | E39Slu4 | exon39 | SluCas9 | − | TTTGATCAGAATGAAGACAATG | AGGG |
| 4515 | E39Slu5 | exon39 | SluCas9 | − | TTTTGATCAGAATGAAGACAAT | GAGG |
| 4516 | E40Slu1 | exon40 | SluCas9 | + | TACCTTTATTTTCCTTTCATCT | CTGG |
| 4517 | E40Slu2 | exon40 | SluCas9 | + | ACCTTTATTTTCCTTTCATCTC | TGGG |
| 4518 | E40Slu3 | exon40 | SluCas9 | + | ATTTTCCTTTCATCTCTGGGCT | CAGG |
| 4519 | E40Slu4 | exon40 | SluCas9 | + | TCCTTTCATCTCTGGGCTCAGG | TAGG |
| 4520 | E40Slu5 | exon40 | SluCas9 | + | TTCATCTCTGGGCTCAGGTAGG | CTGG |
| 4521 | E40Slu6 | exon40 | SluCas9 | + | TTTCAATGTCATCCAAGCATTT | CAGG |
| 4522 | E40Slu8 | exon40 | SluCas9 | − | GCCCAGAGATGAAAGGAAAATA | AAGG |
| 4523 | E40Slu9 | exon40 | SluCas9 | − | GCCTACCTGAGCCCAGAGATGA | AAGG |
| 4524 | E40Slu10 | exon40 | SluCas9 | − | GGCTGATGATCTCCTGAAATGC | TTGG |
| 4525 | E40Slu11 | exon40 | SluCas9 | − | TCAGTGGTATCAGTACAAGAGG | CAGG |
| 4526 | E40Slu12 | exon40 | SluCas9 | − | CTCATCAGTGGTATCAGTACAA | GAGG |
| 4527 | E40Slu13 | exon40 | SluCas9 | − | AGGCTCTAGAAATTTCTCATCA | GTGG |
| 4528 | E40Slu14 | exon40 | SluCas9 | − | TTTGAGGTCTCAAAGAAGAAAA | AAGG |
| 4529 | E40Slu15 | exon40 | SluCas9 | − | GTCTGCACCATGAACAGGATTT | GAGG |
| 4530 | E41Slu1 | exon41 | SluCas9 | + | TTTCCCGCCAGCGCTTGCTGAG | CTGG |
| 4531 | E41Slu2 | exon41 | SluCas9 | + | CGCTTGCTGAGCTGGATCTGAG | TTGG |
| 4532 | E41Slu3 | exon41 | SluCas9 | + | CTGAGTTGGCTCCACTGCCATT | GCGG |
| 4533 | E41Slu9 | exon41 | SluCas9 | − | GATCCAGCTCAGCAAGCGCTGG | CGGG |
| 4534 | E41Slu10 | exon41 | SluCas9 | − | AGATCCAGCTCAGCAAGCGCTG | GCGG |
| 4535 | E41Slu11 | exon41 | SluCas9 | − | CTCAGATCCAGCTCAGCAAGCG | CTGG |
| 4536 | E41Slu12 | exon41 | SluCas9 | − | TGAGGATGGGGCCGCAATGGCA | GTGG |
| 4537 | E41Slu13 | exon41 | SluCas9 | − | CTTGTCTGAGGATGGGGCCGCA | ATGG |
| 4538 | E41Slu14 | exon41 | SluCas9 | − | AGCTGAGGGCTTGTCTGAGGAT | GGGG |
| 4539 | E41Slu15 | exon41 | SluCas9 | − | AAGCTGAGGGCTTGTCTGAGGA | TGGG |
| 4540 | E41Slu16 | exon41 | SluCas9 | − | CAAGCTGAGGGCTTGTCTGAGG | ATGG |
| 4541 | E41Slu17 | exon41 | SluCas9 | − | TAGGCAAGCTGAGGGCTTGTCT | GAGG |
| 4542 | E41Slu18 | exon41 | SluCas9 | − | AATGCAGTGCGTAGGCAAGCTG | AGGG |
| 4543 | E41Slu19 | exon41 | SluCas9 | − | GAATGCAGTGCGTAGGCAAGCT | GAGG |
| 4544 | E41Slu20 | exon41 | SluCas9 | − | AAGAGGAGCTGAATGCAGTGCG | TAGG |
| 4545 | E41Slu21 | exon41 | SluCas9 | − | TCGGGAATTGCAGAAGAAGAAA | GAGG |
| 4546 | E41Slu22 | exon41 | SluCas9 | − | TTTTGCTCAATAGGAAATTGAT | CGGG |
| 4547 | E41Slu23 | exon41 | SluCas9 | − | GTTTTGCTCAATAGGAAATTGA | TCGG |
| 4548 | E42Slu2 | exon42 | SluCas9 | + | GATCTTCAAAGTCCTTAGCACA | GAGG |
| 4549 | E42Slu3 | exon42 | SluCas9 | + | TCAAAGTCCTTAGCACAGAGGT | CAGG |
| 4550 | E42Slu4 | exon42 | SluCas9 | + | TGAGAAGTTGTTCCACTTCTAA | TAGG |
| 4551 | E42Slu5 | exon42 | SluCas9 | + | GAGAAGTTGTTCCACTTCTAAT | AGGG |
| 4552 | E42Slu6 | exon42 | SluCas9 | + | GTGATTTCAGTCAAATAAGTAG | AAGG |
| 4553 | E42Slu7 | exon42 | SluCas9 | + | GAAGGCACATAAGAAATTTCCA | AAGG |
| 4554 | E42Slu8 | exon42 | SluCas9 | + | TCATCACCATCATCGTTTCTTC | ACGG |
| 4555 | E42Slu9 | exon42 | SluCas9 | + | TCGTTTCTTCACGGACAGTGTG | CTGG |
| 4556 | E42Slu10 | exon42 | SluCas9 | − | CTTTAAGCAAGAGGAGTCTCTG | AAGG |
| 4557 | E42Slu11 | exon42 | SluCas9 | − | CTTTGAAGATCTCTTTAAGCAA | GAGG |
| 4558 | E42Slu12 | exon42 | SluCas9 | − | CAATGCTCCTGACCTCTGTGCT | AAGG |
| 4559 | E42Slu13 | exon42 | SluCas9 | − | TGTCTCACAAGCCCTATTAGAA | GTGG |
| 4560 | E42Slu14 | exon42 | SluCas9 | − | GGTGATGACTGAAGACATGCCT | TTGG |
| 4561 | E42Slu15 | exon42 | SluCas9 | − | CACTGTCCGTGAAGAAACGATG | ATGG |
| 4562 | E43Slu1 | exon43 | SluCas9 | + | ATATATGTGTTACCTACCCTTG | TCGG |
| 4563 | E43Slu2 | exon43 | SluCas9 | + | ACATTTTGTTAACTTTTTCCCA | TTGG |
| 4564 | E43Slu3 | exon43 | SluCas9 | + | CTTTTTCCCATTGGAAATCAAG | CTGG |
| 4565 | E43Slu4 | exon43 | SluCas9 | + | TTTTTCCCATTGGAAATCAAGC | TGGG |
| 4566 | E43Slu5 | exon43 | SluCas9 | + | TCCTGTAGCTTCACCCTTTCCA | CAGG |
| 4567 | E43Slu6 | exon43 | SluCas9 | − | AATGTACAAGGACCGACAAGGG | TAGG |
| 4568 | E43Slu7 | exon43 | SluCas9 | − | ACAAAATGTACAAGGACCGACA | AGGG |
| 4569 | E43Slu8 | exon43 | SluCas9 | − | AACAAAATGTACAAGGACCGAC | AAGG |
| 4570 | E43Slu9 | exon43 | SluCas9 | − | GGAAAAAGTTAACAAAATGTAC | AAGG |
| 4571 | E43Slu10 | exon43 | SluCas9 | − | TCTCTCCCAGCTTGATTTCCAA | TGGG |
| 4572 | E43Slu11 | exon43 | SluCas9 | − | CTCTCTCCCAGCTTGATTTCCA | ATGG |
| 4573 | E43Slu12 | exon43 | SluCas9 | − | GCCTGTGGAAAGGGTGAAGCTA | CAGG |
| 4574 | E43Slu13 | exon43 | SluCas9 | − | GCAAAGTGCAACGCCTGTGGAA | AGGG |
| 4575 | E43Slu14 | exon43 | SluCas9 | − | TGCAAAGTGCAACGCCTGTGGA | AAGG |
| 4576 | E43Slu15 | exon43 | SluCas9 | − | AGCATTGCAAAGTGCAACGCCT | GTGG |
| 4577 | E43Slu16 | exon43 | SluCas9 | − | ATAGTCTACAACAAAGCTCAGG | TCGG |
| 4578 | E43Slu17 | exon43 | SluCas9 | − | AAAGATAGTCTACAACAAAGCT | CAGG |
| 4579 | E46Slu1 | exon46 | SluCas9 | + | TCTTTTAGTTGCTGCTCTTTTC | CAGG |
| 4580 | E46Slu2 | exon46 | SluCas9 | + | TGCTGCTCTTTTCCAGGTTCAA | GTGG |
| 4581 | E46Slu3 | exon46 | SluCas9 | + | GCTGCTCTTTTCCAGGTTCAAG | TGGG |
| 4582 | E46Slu4 | exon46 | SluCas9 | + | GATATTCTTTTGTTCTTCTAGC | CTGG |
| 4583 | E46Slu7 | exon46 | SluCas9 | − | AAAAGAAAAGCTTGAGCAAGTC | AAGG |
| 4584 | E46Slu8 | exon46 | SluCas9 | − | ATTGCTAGTATCCCACTTGAAC | CTGG |
| 4585 | E46Slu9 | exon46 | SluCas9 | − | AAATGAATTTGTTTTATGGTTG | GAGG |
| 4586 | E46Slu10 | exon46 | SluCas9 | − | TTTAAATGAATTTGTTTTATGG | TTGG |
| 4587 | E46Slu11 | exon46 | SluCas9 | − | GAGATTTAAATGAATTTGTTTT | ATGG |
| 4588 | E47Slu1 | exon47 | SluCas9 | + | GTTAATGTCTAACCTTTATCCA | CTGG |
| 4589 | E47Slu2 | exon47 | SluCas9 | + | TTTTCAAGTTTATCTTGCTCTT | CTGG |
| 4590 | E47Slu3 | exon47 | SluCas9 | + | TTTCAAGTTTATCTTGCTCTTC | TGGG |
| 4591 | E47Slu4 | exon47 | SluCas9 | + | TTTATCTTGCTCTTCTGGGCTT | ATGG |
| 4592 | E47Slu5 | exon47 | SluCas9 | + | TTATCTTGCTCTTCTGGGCTTA | TGGG |
| 4593 | E47Slu6 | exon47 | SluCas9 | + | GCTTATGGGAGCACTTACAAGC | ACGG |
| 4594 | E47Slu7 | exon47 | SluCas9 | + | CTTATGGGAGCACTTACAAGCA | CGGG |
| 4595 | E47Slu8 | exon47 | SluCas9 | + | CATTTAATTGTTTGAGAATTCC | CTGG |
| 4596 | E47Slu9 | exon47 | SluCas9 | + | ATTGTTTGAGAATTCCCTGGCG | CAGG |
| 4597 | E47Slu10 | exon47 | SluCas9 | + | TTGTTTGAGAATTCCCTGGCGC | AGGG |
| 4598 | E47Slu11 | exon47 | SluCas9 | + | TGTTTGAGAATTCCCTGGCGCA | GGGG |
| 4599 | E47Slu12 | exon47 | SluCas9 | − | GCAGACAAATCTCCAGTGGATA | AAGG |
| 4600 | E47Slu13 | exon47 | SluCas9 | − | AGCTCAAGCAGACAAATCTCCA | GTGG |
| 4601 | E47Slu14 | exon47 | SluCas9 | − | CTCAAACAATTAAATGAAACTG | GAGG |
| 4602 | E47Slu15 | exon47 | SluCas9 | − | ATTCTCAAACAATTAAATGAAA | CTGG |
| 4603 | E47Slu16 | exon47 | SluCas9 | − | GTGGAAGAGTTGCCCCTGCGCC | AGGG |
| 4604 | E47Slu17 | exon47 | SluCas9 | − | GGTGGAAGAGTTGCCCCTGCGC | CAGG |
| 4605 | E47Slu18 | exon47 | SluCas9 | − | CATTTGTCTGTTTCAGTTACTG | GTGG |
| 4606 | E47Slu19 | exon47 | SluCas9 | − | TTGCATTTGTCTGTTTCAGTTA | CTGG |
| 4607 | E48Slu1 | exon48 | SluCas9 | + | AAGTTCCCTACCTTAACGTCAA | ATGG |
| 4608 | E48Slu2 | exon48 | SluCas9 | + | CCTTAACGTCAAATGGTCCTTC | TTGG |
| 4609 | E48Slu3 | exon48 | SluCas9 | + | ACGTCAAATGGTCCTTCTTGGT | TTGG |
| 4610 | E48Slu4 | exon48 | SluCas9 | + | CAAATGGTCCTTCTTGGTTTGG | TTGG |
| 4611 | E48Slu5 | exon48 | SluCas9 | + | TAAATTTCCAACTGATTCCTAA | TAGG |
| 4612 | E48Slu6 | exon48 | SluCas9 | + | GCAGATGATTTAACTGCTCTTC | AAGG |
| 4613 | E48Slu7 | exon48 | SluCas9 | + | CAAGCTTTTTTTCAAGCTGCCC | AAGG |
| 4614 | E48Slu8 | exon48 | SluCas9 | + | GCTTCAATTTCTCCTTGTTTCT | CAGG |
| 4615 | E48Slu9 | exon48 | SluCas9 | + | TCCTTGTTTCTCAGGTAAAGCT | CTGG |
| 4616 | E48Slu12 | exon48 | SluCas9 | − | AAGGACCATTTGACGTTAAGGT | AGGG |
| 4617 | E48Slu13 | exon48 | SluCas9 | − | GAAGGACCATTTGACGTTAAGG | TAGG |
| 4618 | E48Slu14 | exon48 | SluCas9 | − | CCAAGAAGGACCATTTGACGTT | AAGG |
| 4619 | E48Slu15 | exon48 | SluCas9 | − | ATTTATAACCAACCAAACCAAG | AAGG |
| 4620 | E48Slu16 | exon48 | SluCas9 | − | GTTATCTCCTATTAGGAATCAG | TTGG |
| 4621 | E48Slu17 | exon48 | SluCas9 | − | TGCTGCTGTGGTTATCTCCTAT | TAGG |
| 4622 | E48Slu18 | exon48 | SluCas9 | − | AGCAGTTAAATCATCTGCTGCT | GTGG |
| 4623 | E48Slu19 | exon48 | SluCas9 | − | TTGAAGCTCAAATAAAAGACCT | TGGG |
| 4624 | E48Slu20 | exon48 | SluCas9 | − | ATTGAAGCTCAAATAAAAGACC | TTGG |
| 4625 | E48Slu21 | exon48 | SluCas9 | − | TCCAGAGCTTTACCTGAGAAAC | AAGG |
| 4626 | E49Slu1 | exon49 | SluCas9 | + | AGAGGTTGCTTCATTACCTTCA | CTGG |
| 4627 | E49Slu2 | exon49 | SluCas9 | + | CTTCATTACCTTCACTGGCTGA | GTGG |
| 4628 | E49Slu3 | exon49 | SluCas9 | + | ATTACCTTCACTGGCTGAGTGG | CTGG |
| 4629 | E49Slu4 | exon49 | SluCas9 | + | TTAGACAAAATCTCTTCCACAT | CCGG |
| 4630 | E49Slu5 | exon49 | SluCas9 | + | CTTGAACTGCTATTTCAGTTTC | CTGG |
| 4631 | E49Slu6 | exon49 | SluCas9 | + | TTGAACTGCTATTTCAGTTTCC | TGGG |
| 4632 | E49Slu7 | exon49 | SluCas9 | + | TGAACTGCTATTTCAGTTTCCT | GGGG |
| 4633 | E49Slu8 | exon49 | SluCas9 | − | AAAACCAGCCACTCAGCCAGTG | AAGG |
| 4634 | E49Slu9 | exon49 | SluCas9 | − | GTCTAAAGGGCAGCATTTGTAC | AAGG |
| 4635 | E49Slu10 | exon49 | SluCas9 | − | ATGTGGAAGAGATTTTGTCTAA | AGGG |
| 4636 | E49Slu11 | exon49 | SluCas9 | − | GATGTGGAAGAGATTTTGTCTA | AAGG |
| 4637 | E49Slu12 | exon49 | SluCas9 | − | AGTTCAAGCTAAACAACCGGAT | GTGG |
| 4638 | E49Slu13 | exon49 | SluCas9 | − | AATAGCAGTTCAAGCTAAACAA | CCGG |
| 4639 | E52Slu1 | exon52 | SluCas9 | + | GATTGTTCTAGCCTCTTGATTG | CTGG |
| 4640 | E52Slu2 | exon52 | SluCas9 | + | TGCTGGTCTTGTTTTTCAAATT | TTGG |
| 4641 | E52Slu3 | exon52 | SluCas9 | + | GCTGGTCTTGTTTTTCAAATTT | TGGG |
| 4642 | E52Slu4 | exon52 | SluCas9 | + | CTTGTTTTTCAAATTTTGGGCA | GCGG |
| 4643 | E52Slu5 | exon52 | SluCas9 | + | CAGCGGTAATGAGTTCTTCCAA | CTGG |
| 4644 | E52Slu6 | exon52 | SluCas9 | + | AGCGGTAATGAGTTCTTCCAAC | TGGG |
| 4645 | E52Slu7 | exon52 | SluCas9 | + | GCGGTAATGAGTTCTTCCAACT | GGGG |
| 4646 | E52Slu12 | exon52 | SluCas9 | − | TCAAGAGGCTAGAACAATCATT | ACGG |
| 4647 | E52Slu13 | exon52 | SluCas9 | − | GAAAAACAAGACCAGCAATCAA | GAGG |
| 4648 | E52Slu14 | exon52 | SluCas9 | − | TTTGGAACAGAGGCGTCCCCAG | TTGG |
| 4649 | E52Slu15 | exon52 | SluCas9 | − | CAACAATGCAGGATTTGGAACA | GAGG |
| 4650 | E52Slu16 | exon52 | SluCas9 | − | CTTACAGGCAACAATGCAGGAT | TTGG |
| 4651 | E52Slu17 | exon52 | SluCas9 | − | TTTGTTCTTACAGGCAACAATG | CAGG |
| 4652 | E54Slu1 | exon54 | SluCas9 | + | CCTTTTATGAATGCTTCTCCAA | GAGG |
| 4653 | E54Slu2 | exon54 | SluCas9 | + | CATTGATATTCTCTGTTATCAT | GTGG |
| 4654 | E54Slu3 | exon54 | SluCas9 | + | CTCTGTTATCATGTGGACTTTT | CTGG |
| 4655 | E54Slu4 | exon54 | SluCas9 | + | TGGTATCATCTGCAGAATAATC | CCGG |
| 4656 | E54Slu5 | exon54 | SluCas9 | + | CAGAATAATCCCGGAGAAGTTT | CAGG |
| 4657 | E54Slu6 | exon54 | SluCas9 | + | AGAATAATCCCGGAGAAGTTTC | AGGG |
| 4658 | E54Slu7 | exon54 | SluCas9 | + | CCACATCTACATTTGTCTGCCA | CTGG |
| 4659 | E54Slu8 | exon54 | SluCas9 | + | CATCTACATTTGTCTGCCACTG | GCGG |
| 4660 | E54Slu9 | exon54 | SluCas9 | + | CTACATTTGTCTGCCACTGGCG | GAGG |
| 4661 | E54Slu10 | exon54 | SluCas9 | + | TGTCTGCCACTGGCGGAGGTCT | TTGG |
| 4662 | E54Slu11 | exon54 | SluCas9 | − | CCTCTTGGAGAAGCATTCATAA | AAGG |
| 4663 | E54Slu12 | exon54 | SluCas9 | − | TAACAGAGAATATCAATGCCTC | TTGG |
| 4664 | E54Slu13 | exon54 | SluCas9 | − | TGACTTGGCCCTGAAACTTCTC | CGGG |
| 4665 | E54Slu14 | exon54 | SluCas9 | − | ATGACTTGGCCCTGAAACTTCT | CCGG |
| 4666 | E54Slu15 | exon54 | SluCas9 | − | AAATGTAGATGTGGCAAATGAC | TTGG |
| 4667 | E54Slu16 | exon54 | SluCas9 | − | CCAGTGGCAGACAAATGTAGAT | GTGG |
| 4668 | E54Slu17 | exon54 | SluCas9 | − | AGTTGGCCAAAGACCTCCGCCA | GTGG |
| 4669 | E54Slu18 | exon54 | SluCas9 | − | TTCTCATAAAAATCTATAGCAG | TTGG |
| 4670 | E55Slu1 | exon55 | SluCas9 | + | TTTCATCAGCTCTTTTACTCCC | TTGG |
| 4671 | E55Slu2 | exon55 | SluCas9 | + | CTTTTACTCCCTTGGAGTCTTC | TAGG |
| 4672 | E55Slu3 | exon55 | SluCas9 | + | AGTCTTCTAGGAGCCTTTCCTT | ACGG |
| 4673 | E55Slu4 | exon55 | SluCas9 | + | GTCTTCTAGGAGCCTTTCCTTA | CGGG |
| 4674 | E55Slu5 | exon55 | SluCas9 | + | TTTCCTTACGGGTAGCATCCTG | TAGG |
| 4675 | E55Slu6 | exon55 | SluCas9 | + | ACGGGTAGCATCCTGTAGGACA | TTGG |
| 4676 | E55Slu7 | exon55 | SluCas9 | + | AGTTGTTTCAGCTTCTGTAAGC | CAGG |
| 4677 | E55Slu8 | exon55 | SluCas9 | + | TAAGCCAGGCAAGAAACTTTTC | CAGG |
| 4678 | E55Slu9 | exon55 | SluCas9 | + | AGGCAAGAAACTTTTCCAGGTC | CAGG |
| 4679 | E55Slu10 | exon55 | SluCas9 | + | GGCAAGAAACTTTTCCAGGTCC | AGGG |
| 4680 | E55Slu11 | exon55 | SluCas9 | + | GCAAGAAACTTTTCCAGGTCCA | GGGG |
| 4681 | E55Slu12 | exon55 | SluCas9 | + | CAAGAAACTTTTCCAGGTCCAG | GGGG |
| 4682 | E55Slu15 | exon55 | SluCas9 | − | GAGTAAAAGAGCTGATGAAACA | ATGG |
| 4683 | E55Slu16 | exon55 | SluCas9 | − | GAAAGGCTCCTAGAAGACTCCA | AGGG |
| 4684 | E55Slu17 | exon55 | SluCas9 | − | GGAAAGGCTCCTAGAAGACTCC | AAGG |
| 4685 | E55Slu18 | exon55 | SluCas9 | − | TACAGGATGCTACCCGTAAGGA | AAGG |
| 4686 | E55Slu19 | exon55 | SluCas9 | − | TGTCCTACAGGATGCTACCCGT | AAGG |
| 4687 | E55Slu20 | exon55 | SluCas9 | − | TGAAACAACTGCCAATGTCCTA | CAGG |
| 4688 | E55Slu21 | exon55 | SluCas9 | − | TGGACCTGGAAAAGTTTCTTGC | CTGG |
| 4689 | E55Slu22 | exon55 | SluCas9 | − | ACTGCAACAGTTCCCCCTGGAC | CTGG |
| 4690 | E55Slu23 | exon55 | SluCas9 | − | TAGATTACTGCAACAGTTCCCC | CTGG |
| 4691 | E55Slu24 | exon55 | SluCas9 | − | GGTGAGTGAGCGAGAGGCTGCT | TTGG |
| 4692 | E55Slu25 | exon55 | SluCas9 | − | CCTTTGCAGGGTGAGTGAGCGA | GAGG |
| 4693 | E56Slu1 | exon56 | SluCas9 | + | TGTTATCCAAACGTCTTTGTAA | CAGG |
| 4694 | E56Slu2 | exon56 | SluCas9 | + | TCTTTGTAACAGGACTGCATCA | TCGG |
| 4695 | E56Slu3 | exon56 | SluCas9 | + | GGACTGCATCATCGGAACCTTC | CAGG |
| 4696 | E56Slu4 | exon56 | SluCas9 | + | GACTGCATCATCGGAACCTTCC | AGGG |
| 4697 | E56Slu5 | exon56 | SluCas9 | + | CATCGGAACCTTCCAGGGATCT | CAGG |
| 4698 | E56Slu6 | exon56 | SluCas9 | + | CTTCCAGGGATCTCAGGATTTT | TTGG |
| 4699 | E56Slu7 | exon56 | SluCas9 | + | GGATTTTTTGGCTGTTTTCATC | CAGG |
| 4700 | E56Slu8 | exon56 | SluCas9 | + | CTGTGTGAGCTTCAATTTCACC | TTGG |
| 4701 | E56Slu9 | exon56 | SluCas9 | + | TGTGAGCTTCAATTTCACCTTG | GAGG |
| 4702 | E56Slu10 | exon56 | SluCas9 | + | CAATTTCACCTTGGAGGTCCTA | CAGG |
| 4703 | E56Slu14 | exon56 | SluCas9 | − | GAAAAAGTCTCTCAACATTAGG | TAGG |
| 4704 | E56Slu15 | exon56 | SluCas9 | − | TTCGGAAAAAGTCTCTCAACAT | TAGG |
| 4705 | E56Slu16 | exon56 | SluCas9 | − | TGAACTTCAAGTGGAGTGAACT | TCGG |
| 4706 | E56Slu17 | exon56 | SluCas9 | − | GTTTGGATAACATGAACTTCAA | GTGG |
| 4707 | E56Slu18 | exon56 | SluCas9 | − | TGCAGTCCTGTTACAAAGACGT | TTGG |
| 4708 | E56Slu19 | exon56 | SluCas9 | − | CAAAAAATCCTGAGATCCCTGG | AAGG |
| 4709 | E56Slu20 | exon56 | SluCas9 | − | CAGCCAAAAAATCCTGAGATCC | CTGG |
| 4710 | E56Slu21 | exon56 | SluCas9 | − | TCACACAGATGTTTATCACAAC | CTGG |
| 4711 | E56Slu22 | exon56 | SluCas9 | − | CCTGCTGTCCTGTAGGACCTCC | AAGG |
| 4712 | E57Slu1 | exon57 | SluCas9 | + | ACATCGTTCTGCTTCTGAACTG | CTGG |
| 4713 | E57Slu2 | exon57 | SluCas9 | + | ACTGCTGGAAAGTCGCCTCCAA | TAGG |
| 4714 | E57Slu3 | exon57 | SluCas9 | + | AGTCGCCTCCAATAGGTGCCTG | CCGG |
| 4715 | E57Slu4 | exon57 | SluCas9 | + | ACACCAGAAGTTCCTGCAGAGA | AAGG |
| 4716 | E57Slu5 | exon57 | SluCas9 | + | GAGAAAGGTGCAGACGCTTCCA | CTGG |
| 4717 | E57Slu6 | exon57 | SluCas9 | + | CAGACGCTTCCACTGGTCAGAA | CTGG |
| 4718 | E57Slu7 | exon57 | SluCas9 | + | ACTGGTCAGAACTGGCTTCCAA | ATGG |
| 4719 | E57Slu8 | exon57 | SluCas9 | + | CTGGTCAGAACTGGCTTCCAAA | TGGG |
| 4720 | E57Slu9 | exon57 | SluCas9 | − | AAGCAGAACGATGTACATAGGG | TAGG |
| 4721 | E57Slu10 | exon57 | SluCas9 | − | TCAGAAGCAGAACGATGTACAT | AGGG |
| 4722 | E57Slu11 | exon57 | SluCas9 | − | TTCAGAAGCAGAACGATGTACA | TAGG |
| 4723 | E57Slu12 | exon57 | SluCas9 | − | TTAAGCCGGCAGGCACCTATTG | GAGG |
| 4724 | E57Slu13 | exon57 | SluCas9 | − | GAATTAAGCCGGCAGGCACCTA | TTGG |
| 4725 | E57Slu14 | exon57 | SluCas9 | − | GAAAGATGATGAATTAAGCCGG | CAGG |
| 4726 | E57Slu15 | exon57 | SluCas9 | − | AGCTGAAAGATGATGAATTAAG | CCGG |
| 4727 | E57Slu16 | exon57 | SluCas9 | − | TTTCTCTGCAGGAACTTCTGGT | GTGG |
| 4728 | E57Slu17 | exon57 | SluCas9 | − | GCACCTTTCTCTGCAGGAACTT | CTGG |
| 4729 | E57Slu18 | exon57 | SluCas9 | − | GAAGCGTCTGCACCTTTCTCTG | CAGG |
| 4730 | E57Slu19 | exon57 | SluCas9 | − | ATTTGGAAGCCAGTTCTGACCA | GTGG |
| 4731 | E57Slu20 | exon57 | SluCas9 | − | GCTGTTCTTTTTCAGGTCCCAT | TTGG |
| 4732 | E58Slu2 | exon58 | SluCas9 | + | TAGTTCCACATTCAATTACCTC | TGGG |
| 4733 | E58Slu3 | exon58 | SluCas9 | + | ACATTCAATTACCTCTGGGCTC | CTGG |
| 4734 | E58Slu4 | exon58 | SluCas9 | + | TAGAGTTTCTCTAGTCCTTCCA | AAGG |
| 4735 | E58Slu5 | exon58 | SluCas9 | + | GTCTCAAGAGTACTCATGATTA | CAGG |
| 4736 | E58Slu6 | exon58 | SluCas9 | + | TTTAGTTTTCAATTCCCTCTTG | AAGG |
| 4737 | E58Slu8 | exon58 | SluCas9 | − | GAGAAACTCTACCAGGAGCCCA | GAGG |
| 4738 | E58Slu9 | exon58 | SluCas9 | − | GGAAGGACTAGAGAAACTCTAC | CAGG |
| 4739 | E58Slu10 | exon58 | SluCas9 | − | TTTCTGACAGAGCAGCCTTTGG | AAGG |
| 4740 | E58Slu11 | exon58 | SluCas9 | − | AATATTTCTGACAGAGCAGCCT | TTGG |
| 4741 | E58Slu12 | exon58 | SluCas9 | − | TCTCATTTCACAGGCCTTCAAG | AGGG |
| 4742 | E58Slu13 | exon58 | SluCas9 | − | ATCTCATTTCACAGGCCTTCAA | GAGG |
| 4743 | E59Slu2 | exon59 | SluCas9 | + | TAGACGGTACCTTGACTTTCTC | GAGG |
| 4744 | E59Slu3 | exon59 | SluCas9 | + | CCTTGACTTTCTCGAGGTGATC | TTGG |
| 4745 | E59Slu4 | exon59 | SluCas9 | + | GGTGATCTTGGAGAGAGTCAAT | GAGG |
| 4746 | E59Slu5 | exon59 | SluCas9 | + | AGAGTCAATGAGGAGATCGCCC | ACGG |
| 4747 | E59Slu6 | exon59 | SluCas9 | + | GAGTCAATGAGGAGATCGCCCA | CGGG |
| 4748 | E59Slu7 | exon59 | SluCas9 | + | GAGGAGATCGCCCACGGGCTGC | CAGG |
| 4749 | E59Slu8 | exon59 | SluCas9 | + | AGGATCCCTTGATCACCTCAGC | TTGG |
| 4750 | E59Slu9 | exon59 | SluCas9 | + | TCACCTCAGCTTGGCGCAGCTT | GAGG |
| 4751 | E59Slu10 | exon59 | SluCas9 | + | CAGCTTGAGGTCCAGCTCATCC | GTGG |
| 4752 | E59Slu11 | exon59 | SluCas9 | + | CATCCGTGGCCTCTTGAAGTTC | CCGG |
| 4753 | E59Slu12 | exon59 | SluCas9 | + | CTTGAAGTTCCCGGAGTCTTTC | AAGG |
| 4754 | E59Slu13 | exon59 | SluCas9 | + | TTGAAGTTCCCGGAGTCTTTCA | AGGG |
| 4755 | E59Slu14 | exon59 | SluCas9 | + | ATCTATTTTTCTCTGCCAGTCA | GCGG |
| 4756 | E59Slu15 | exon59 | SluCas9 | + | TTCTCTGCCAGTCAGCGGAGTG | CAGG |
| 4757 | E59Slu16 | exon59 | SluCas9 | + | TTCGTAGAAGCCGAGTGACATT | CTGG |
| 4758 | E59Slu17 | exon59 | SluCas9 | + | TCGTAGAAGCCGAGTGACATTC | TGGG |
| 4759 | E59Slu18 | exon59 | SluCas9 | + | GTGACATTCTGGGCTCTCTCCT | CAGG |
| 4760 | E59Slu19 | exon59 | SluCas9 | + | ACATTCTGGGCTCTCTCCTCAG | GAGG |
| 4761 | E59Slu25 | exon59 | SluCas9 | − | CCAAGATCACCTCGAGAAAGTC | AAGG |
| 4762 | E59Slu26 | exon59 | SluCas9 | − | ATCAAGGGATCCTGGCAGCCCG | TGGG |
| 4763 | E59Slu27 | exon59 | SluCas9 | − | GATCAAGGGATCCTGGCAGCCC | GTGG |
| 4764 | E59Slu28 | exon59 | SluCas9 | − | AAGCTGAGGTGATCAAGGGATC | CTGG |
| 4765 | E59Slu29 | exon59 | SluCas9 | − | CTGCGCCAAGCTGAGGTGATCA | AGGG |
| 4766 | E59Slu30 | exon59 | SluCas9 | − | GCTGCGCCAAGCTGAGGTGATC | AAGG |
| 4767 | E59Slu31 | exon59 | SluCas9 | − | GGACCTCAAGCTGCGCCAAGCT | GAGG |
| 4768 | E59Slu32 | exon59 | SluCas9 | − | ACTTCAAGAGGCCACGGATGAG | CTGG |
| 4769 | E59Slu33 | exon59 | SluCas9 | − | ACTCCGGGAACTTCAAGAGGCC | ACGG |
| 4770 | E59Slu34 | exon59 | SluCas9 | | TGAAAGACTCCGGGAACTTCAA | GAGG |
| 4771 | E59Slu35 | exon59 | SluCas9 | − | AGATGAGACCCTTGAAAGACTC | CGGG |
| 4772 | E59Slu36 | exon59 | SluCas9 | − | TAGATGAGACCCTTGAAAGACT | CCGG |
| 4773 | E59Slu37 | exon59 | SluCas9 | − | AATTGAACCTGCACTCCGCTGA | CTGG |
| 4774 | E59Slu38 | exon59 | SluCas9 | − | GGCTGAGGAGGTCAATACTGAG | TGGG |
| 4775 | E59Slu39 | exon59 | SluCas9 | − | AGGCTGAGGAGGTCAATACTGA | GTGG |
| 4776 | E59Slu40 | exon59 | SluCas9 | − | GCTTCTACGAAAGCAGGCTGAG | GAGG |
| 4777 | E59Slu41 | exon59 | SluCas9 | − | TCGGCTTCTACGAAAGCAGGCT | GAGG |
| 4778 | E59Slu42 | exon59 | SluCas9 | − | TGTCACTCGGCTTCTACGAAAG | CAGG |
| 4779 | E59Slu43 | exon59 | SluCas9 | − | AGGAGAGAGCCCAGAATGTCAC | TCGG |
| 4780 | E59Slu44 | exon59 | SluCas9 | − | TGCCAATTTAGAGCTGCCTCCT | GAGG |
| 4781 | E60Slu1 | exon60 | SluCas9 | + | GCTTACCTGCAGAAGCTTCCAT | CTGG |
| 4782 | E60Slu2 | exon60 | SluCas9 | + | GCAGAAGCTTCCATCTGGTGTT | CAGG |
| 4783 | E60Slu3 | exon60 | SluCas9 | + | TGTTCAGGTCTTCCAGAGTGCT | GAGG |
| 4784 | E60Slu4 | exon60 | SluCas9 | + | TCTTCCAGAGTGCTGAGGTTAT | ACGG |
| 4785 | E60Slu5 | exon60 | SluCas9 | + | CGGTGAGAGCTGAATGCCCAAA | GTGG |
| 4786 | E60Slu6 | exon60 | SluCas9 | + | GCTGAATGCCCAAAGTGGTAAG | CTGG |
| 4787 | E60Slu7 | exon60 | SluCas9 | + | CCAAAGTGGTAAGCTGGCGAGC | AAGG |
| 4788 | E60Slu8 | exon60 | SluCas9 | + | GCTGGCGAGCAAGGTCATTGAC | GTGG |
| 4789 | E60Slu9 | exon60 | SluCas9 | + | ACGTGGCTCACGTTCTCTTTCA | GAGG |
| 4790 | E60Slu11 | exon60 | SluCas9 | − | GAACACCAGATGGAAGCTTCTG | CAGG |
| 4791 | E60Slu12 | exon60 | SluCas9 | − | CTCTGGAAGACCTGAACACCAG | ATGG |
| 4792 | E60Slu13 | exon60 | SluCas9 | − | CTCACCGTATAACCTCAGCACT | CTGG |
| 4793 | E60Slu14 | exon60 | SluCas9 | − | CTTGCTCGCCAGCTTACCACTT | TGGG |
| 4794 | E60Slu15 | exon60 | SluCas9 | − | CCTTGCTCGCCAGCTTACCACT | TTGG |
| 4795 | E60Slu16 | exon60 | SluCas9 | − | GACTATTGCACACAGGCACTTC | GAGG |
| 4796 | E61Slu2 | exon61 | SluCas9 | + | CTGGAAAGAAAGTGCTGAGATG | CTGG |
| 4797 | E61Slu3 | exon61 | SluCas9 | + | GAGATGCTGGACCAAAGTCCCT | GTGG |
| 4798 | E61Slu4 | exon61 | SluCas9 | + | AGATGCTGGACCAAAGTCCCTG | TGGG |
| 4799 | E61Slu5 | exon61 | SluCas9 | + | GGGCTTCATGCAGCTGCCTGAC | TCGG |
| 4800 | E61Slu6 | exon61 | SluCas9 | + | CAGCTGCCTGACTCGGTCCTCG | ACGG |
| 4801 | E61Slu7 | exon61 | SluCas9 | + | TGACTCGGTCCTCGACGGCCAC | CTGG |
| 4802 | E61Slu8 | exon61 | SluCas9 | + | GACTCGGTCCTCGACGGCCACC | TGGG |
| 4803 | E61Slu11 | exon61 | SluCas9 | − | CTGCATGAAGCCCACAGGGACT | TTGG |
| 4804 | E61Slu12 | exon61 | SluCas9 | − | CAGGCAGCTGCATGAAGCCCAC | AGGG |
| 4805 | E61Slu13 | exon61 | SluCas9 | − | TCAGGCAGCTGCATGAAGCCCA | CAGG |
| 4806 | E61Slu14 | exon61 | SluCas9 | − | AGGTGGCCGTCGAGGACCGAGT | CAGG |
| 4807 | E61Slu15 | exon61 | SluCas9 | − | CTTTTCCTCCCAGGTGGCCGTC | GAGG |
| 4808 | E62Slu1 | exon62 | SluCas9 | + | ACTTCCAACTTACTTGATATAG | TAGG |
| 4809 | E62Slu2 | exon62 | SluCas9 | + | CTTCCAACTTACTTGATATAGT | AGGG |
| 4810 | E62Slu3 | exon62 | SluCas9 | + | TTGATATAGTAGGGCACTTTGT | TTGG |
| 4811 | E62Slu4 | exon62 | SluCas9 | + | GTAGGGCACTTTGTTTGGCGAG | ATGG |
| 4812 | E62Slu5 | exon62 | SluCas9 | + | GTTTGGCGAGATGGCTCTCTCC | CAGG |
| 4813 | E62Slu6 | exon62 | SluCas9 | + | TTTGGCGAGATGGCTCTCTCCC | AGGG |
| 4814 | E62Slu7 | exon62 | SluCas9 | + | AGATGGCTCTCTCCCAGGGACC | CTGG |
| 4815 | E62Slu13 | exon62 | SluCas9 | − | TTCAGCGTCTGTCCAGGGTCCC | TGGG |
| 4816 | E62Slu14 | exon62 | SluCas9 | − | TTTCAGCGTCTGTCCAGGGTCC | CTGG |
| 4817 | E62Slu15 | exon62 | SluCas9 | − | CCCTTCTTTTCAGCGTCTGTCC | AGGG |
| 4818 | E62Slu16 | exon62 | SluCas9 | − | TCCCTTCTTTTCAGCGTCTGTC | CAGG |
| 4819 | E63Slu1 | exon63 | SluCas9 | + | TGGCCATGTCCTTACCTAAAGA | CTGG |
| 4820 | E63Slu2 | exon63 | SluCas9 | + | AGACTGGTAGAGCTCTGTCATT | TTGG |
| 4821 | E63Slu3 | exon63 | SluCas9 | + | GACTGGTAGAGCTCTGTCATTT | TGGG |
| 4822 | E63Slu4 | exon63 | SluCas9 | + | GGTAGAGCTCTGTCATTTTGGG | ATGG |
| 4823 | E63Slu5 | exon63 | SluCas9 | + | CCCAGCAAGTTGTTTGAGTCTC | GTGG |
| 4824 | E63Slu7 | exon63 | SluCas9 | − | AGAGCTCTACCAGTCTTTAGGT | AAGG |
| 4825 | E63Slu8 | exon63 | SluCas9 | − | ATGACAGAGCTCTACCAGTCTT | TAGG |
| 4826 | E63Slu9 | exon63 | SluCas9 | − | CCACGAGACTCAAACAACTTGC | TGGG |
| 4827 | E63Slu10 | exon63 | SluCas9 | − | GCCACGAGACTCAAACAACTTG | CTGG |
| 4828 | E64Slu1 | exon64 | SluCas9 | + | ATACTGGCCAATACTTACAGCA | AAGG |
| 4829 | E64Slu2 | exon64 | SluCas9 | + | TACTGGCCAATACTTACAGCAA | AGGG |
| 4830 | E64Slu3 | exon64 | SluCas9 | + | AGCAAAGGGCCTTCTGCAGTCT | TCGG |
| 4831 | E64Slu4 | exon64 | SluCas9 | + | CTTCTGCAGTCTTCGGAGTTTC | ATGG |
| 4832 | E64Slu5 | exon64 | SluCas9 | + | AAGCTGAGAATCTGACATTATT | CAGG |
| 4833 | E64Slu9 | exon64 | SluCas9 | − | CATGAAACTCCGAAGACTGCAG | AAGG |
| 4834 | E64Slu10 | exon64 | SluCas9 | − | ATAATGTCAGATTCTCAGCTTA | TAGG |
| 4835 | E65Slu1 | exon65 | SluCas9 | + | TTCAGACACATATCCACGCAGA | GAGG |
| 4836 | E65Slu2 | exon65 | SluCas9 | + | TCAGACACATATCCACGCAGAG | AGGG |
| 4837 | E65Slu3 | exon65 | SluCas9 | + | CCAAATTGTTGTGCTCTTGCTC | CAGG |
| 4838 | E65Slu4 | exon65 | SluCas9 | + | AATTGTTGTGCTCTTGCTCCAG | GCGG |
| 4839 | E65Slu5 | exon65 | SluCas9 | + | TTGCTCCAGGCGGTCATAAATA | GTGG |
| 4840 | E65Slu6 | exon65 | SluCas9 | + | TGGTCAAACAATTAATAATCTG | CAGG |
| 4841 | E65Slu7 | exon65 | SluCas9 | + | ATTAATAATCTGCAGGATATCC | ATGG |
| 4842 | E65Slu8 | exon65 | SluCas9 | + | TTAATAATCTGCAGGATATCCA | TGGG |
| 4843 | E65Slu9 | exon65 | SluCas9 | + | TAATCTGCAGGATATCCATGGG | CTGG |
| 4844 | E65Slu10 | exon65 | SluCas9 | + | CCATGGGCTGGTCATTTTGCTT | GAGG |
| 4845 | E65Slu11 | exon65 | SluCas9 | + | GGTCATTTTGCTTGAGGTTGTG | CTGG |
| 4846 | E65Slu12 | exon65 | SluCas9 | + | TTGCTTGAGGTTGTGCTGGTCC | AAGG |
| 4847 | E65Slu13 | exon65 | SluCas9 | + | CCAAGGCATCACATGCAGCTGA | CAGG |
| 4848 | E65Slu17 | exon65 | SluCas9 | − | TCTGCGTGGATATGTGTCTGAA | CTGG |
| 4849 | E65Slu18 | exon65 | SluCas9 | − | TTTGGTCAACGTCCCTCTCTGC | GTGG |
| 4850 | E65Slu19 | exon65 | SluCas9 | − | CCTGGAGCAAGAGCACAACAAT | TTGG |
| 4851 | E65Slu20 | exon65 | SluCas9 | − | TTTGACCACTATTTATGACCGC | CTGG |
| 4852 | E65Slu21 | exon65 | SluCas9 | − | CCTCAAGCAAAATGACCAGCCC | ATGG |
| 4853 | E65Slu22 | exon65 | SluCas9 | − | CCTGTCAGCTGCATGTGATGCC | TTGG |
| 4854 | E66Slu1 | exon66 | SluCas9 | + | TGTCTTCCAAATGTGCTTTACA | CAGG |
| 4855 | E66Slu2 | exon66 | SluCas9 | + | GTCTTCCAAATGTGCTTTACAC | AGGG |
| 4856 | E66Slu3 | exon66 | SluCas9 | + | AAATGATGCCAGTTTTAAAAGA | CAGG |
| 4857 | E66Slu4 | exon66 | SluCas9 | + | TGCCAGTTTTAAAAGACAGGAC | ACGG |
| 4858 | E66Slu5 | exon66 | SluCas9 | − | CATTTCCCTGTGTAAAGCACAT | TTGG |
| 4859 | E66Slu6 | exon66 | SluCas9 | − | ATCCGTGTCCTGTCTTTTAAAA | CTGG |
| 4860 | E66Slu7 | exon66 | SluCas9 | − | TTCATAATAGGGGACGAACAGG | GAGG |
| 4861 | E66Slu8 | exon66 | SluCas9 | − | TTCTTCATAATAGGGGACGAAC | AGGG |
| 4862 | E66Slu9 | exon66 | SluCas9 | − | ATTCTTCATAATAGGGGACGAA | CAGG |
| 4863 | E67Slu1 | exon67 | SluCas9 | + | TAGAAGGTGAATAACTTACAAA | TTGG |
| 4864 | E67Slu2 | exon67 | SluCas9 | + | AACTTACAAATTGGAAGCAGCT | CCGG |
| 4865 | E67Slu3 | exon67 | SluCas9 | + | AATTGGAAGCAGCTCCGGACAC | TTGG |
| 4866 | E67Slu4 | exon67 | SluCas9 | + | TGGCTCAATGTTACTGCCCCCA | AAGG |
| 4867 | E67Slu5 | exon67 | SluCas9 | + | GATGCAACTTCACCCAACTGTC | TTGG |
| 4868 | E67Slu6 | exon67 | SluCas9 | + | CTTCACCCAACTGTCTTGGAAT | TTGG |
| 4869 | E67Slu7 | exon67 | SluCas9 | + | GAATTTGGATAGAATCATGCAG | AAGG |
| 4870 | E67Slu8 | exon67 | SluCas9 | + | TTTGGATAGAATCATGCAGAAG | GAGG |
| 4871 | E67Slu9 | exon67 | SluCas9 | + | GCAGAAGGAGGCCCAGCCTGCG | CTGG |
| 4872 | E67Slu10 | exon67 | SluCas9 | + | TTGAACTTGCCACTTGCTTGAA | AAGG |
| 4873 | E67Slu13 | exon67 | SluCas9 | − | GCAGTAACATTGAGCCAAGTGT | CCGG |
| 4874 | E67Slu14 | exon67 | SluCas9 | − | TTGGGTGAAGTTGCATCCTTTG | GGGG |
| 4875 | E67Slu15 | exon67 | SluCas9 | − | GTTGGGTGAAGTTGCATCCTTT | GGGG |
| 4876 | E67Slu16 | exon67 | SluCas9 | − | AGTTGGGTGAAGTTGCATCCTT | TGGG |
| 4877 | E67Slu17 | exon67 | SluCas9 | − | CAGTTGGGTGAAGTTGCATCCT | TTGG |
| 4878 | E67Slu18 | exon67 | SluCas9 | − | TCTATCCAAATTCCAAGACAGT | TGGG |
| 4879 | E67Slu19 | exon67 | SluCas9 | − | TTCTATCCAAATTCCAAGACAG | TTGG |
| 4880 | E67Slu20 | exon67 | SluCas9 | − | GGATTTTGTGACCAGCGCAGGC | TGGG |
| 4881 | E67Slu21 | exon67 | SluCas9 | − | AGGATTTTGTGACCAGCGCAGG | CTGG |
| 4882 | E67Slu22 | exon67 | SluCas9 | − | CAACAGGATTTTGTGACCAGCG | CAGG |
| 4883 | E67Slu23 | exon67 | SluCas9 | − | TTCAAGCAAGTGGCAAGTTCAA | CAGG |
| 4884 | E67Slu24 | exon67 | SluCas9 | − | CTTTGTAGACCTTTTCAAGCAA | GTGG |
| 4885 | E68Slu1 | exon68 | SluCas9 | + | TCCTAATACCTGAATCCAATGA | TTGG |
| 4886 | E68Slu2 | exon68 | SluCas9 | + | ACACTCTTTGCAGATGTTACAT | TTGG |
| 4887 | E68Slu3 | exon68 | SluCas9 | + | GATGTTACATTTGGCCTGATGC | TTGG |
| 4888 | E68Slu4 | exon68 | SluCas9 | + | TTTCTGCAGCAGCCACTCTGTG | CAGG |
| 4889 | E68Slu5 | exon68 | SluCas9 | + | TGCAGCAGCCACTCTGTGCAGG | ACGG |
| 4890 | E68Slu6 | exon68 | SluCas9 | + | GCAGCAGCCACTCTGTGCAGGA | CGGG |
| 4891 | E68Slu7 | exon68 | SluCas9 | + | GTGCAGGACGGGCAGCCACACC | ATGG |
| 4892 | E68Slu8 | exon68 | SluCas9 | + | GGACGGGCAGCCACACCATGGA | CTGG |
| 4893 | E68Slu9 | exon68 | SluCas9 | + | GACGGGCAGCCACACCATGGAC | TGGG |
| 4894 | E68Slu10 | exon68 | SluCas9 | + | ACGGGCAGCCACACCATGGACT | GGGG |
| 4895 | E68Slu11 | exon68 | SluCas9 | + | GGGGTTCCAGTCTCATCCAGTC | TAGG |
| 4896 | E68Slu12 | exon68 | SluCas9 | + | CCAGTCTCATCCAGTCTAGGAA | GAGG |
| 4897 | E68Slu13 | exon68 | SluCas9 | + | CAGTCTCATCCAGTCTAGGAAG | AGGG |
| 4898 | E68Slu14 | exon68 | SluCas9 | + | AGGAAGAGGGCCGCTTCGATCT | CTGG |
| 4899 | E68Slu22 | exon68 | SluCas9 | − | AAGAGTGTCCAATCATTGGATT | CAGG |
| 4900 | E68Slu23 | exon68 | SluCas9 | − | ATCTGCAAAGAGTGTCCAATCA | TTGG |
| 4901 | E68Slu24 | exon68 | SluCas9 | − | TGCTGCAGAAACTGCCAAGCAT | CAGG |
| 4902 | E68Slu25 | exon68 | SluCas9 | − | GTGGCTGCCCGTCCTGCACAGA | GTGG |
| 4903 | E68Slu26 | exon68 | SluCas9 | − | GACTGGAACCCCAGTCCATGGT | GTGG |
| 4904 | E68Slu27 | exon68 | SluCas9 | − | GATGAGACTGGAACCCCAGTCC | ATGG |
| 4905 | E68Slu28 | exon68 | SluCas9 | − | CCTCTTCCTAGACTGGATGAGA | CTGG |
| 4906 | E68Slu29 | exon68 | SluCas9 | − | TCGAAGCGGCCCTCTTCCTAGA | CTGG |
| 4907 | E68Slu30 | exon68 | SluCas9 | − | TAATAATAAGCCAGAGATCGAA | GCGG |
| 4908 | E69Slu2 | exon69 | SluCas9 | + | TACCGGAGTGCAATATTCCACC | ATGG |
| 4909 | E69Slu3 | exon69 | SluCas9 | + | ACCGGAGTGCAATATTCCACCA | TGGG |
| 4910 | E69Slu4 | exon69 | SluCas9 | + | CCACCATGGGATAGTGCATTTT | ATGG |
| 4911 | E69Slu5 | exon69 | SluCas9 | + | CTCGACCAGAAAAAAAGCAGCT | TTGG |
| 4912 | E69Slu6 | exon69 | SluCas9 | − | TCCCATGGTGGAATATTGCACT | CCGG |
| 4913 | E69Slu7 | exon69 | SluCas9 | − | CCATAAAATGCACTATCCCATG | GTGG |
| 4914 | E69Slu8 | exon69 | SluCas9 | − | AGGCCATAAAATGCACTATCCC | ATGG |
| 4915 | E69Slu9 | exon69 | SluCas9 | − | TTTTTTTCTGGTCGAGTTGCAA | AAGG |
| 4916 | E69Slu10 | exon69 | SluCas9 | − | ATCTGCCAAAGCTGCTTTTTTT | CTGG |
| 4917 | E69Slu11 | exon69 | SluCas9 | − | TGTTTTTGCTCTTTATCAGGTA | CAGG |
| 4918 | E70Slu1 | exon70 | SluCas9 | + | TCCCCCTCTAAGACAGTCTGCA | CTGG |
| 4919 | E70Slu2 | exon70 | SluCas9 | + | CCTCTAAGACAGTCTGCACTGG | CAGG |
| 4920 | E70Slu3 | exon70 | SluCas9 | + | TCTGCACTGGCAGGTAGCCCAT | TCGG |
| 4921 | E70Slu4 | exon70 | SluCas9 | + | CTGCACTGGCAGGTAGCCCATT | CGGG |
| 4922 | E70Slu5 | exon70 | SluCas9 | + | TGCACTGGCAGGTAGCCCATTC | GGGG |
| 4923 | E70Slu6 | exon70 | SluCas9 | + | GGGATGCTTCGCAAAATACCTT | TTGG |
| 4924 | E70Slu7 | exon70 | SluCas9 | + | TCGAAATTTGTTTTTTAGTACC | TTGG |
| 4925 | E70Slu11 | exon70 | SluCas9 | − | GACTGTCTTAGAGGGGGACAAC | ATGG |
| 4926 | E70Slu12 | exon70 | SluCas9 | − | GCCAGTGCAGACTGTCTTAGAG | GGGG |
| 4927 | E70Slu13 | exon70 | SluCas9 | − | TGCCAGTGCAGACTGTCTTAGA | GGGG |
| 4928 | E70Slu14 | exon70 | SluCas9 | − | CTGCCAGTGCAGACTGTCTTAG | AGGG |
| 4929 | E70Slu15 | exon70 | SluCas9 | − | CCTGCCAGTGCAGACTGTCTTA | GAGG |
| 4930 | E70Slu16 | exon70 | SluCas9 | − | TATTTTGCGAAGCATCCCCGAA | TGGG |
| 4931 | E70Slu17 | exon70 | SluCas9 | − | GTATTTTGCGAAGCATCCCCGA | ATGG |
| 4932 | E70Slu18 | exon70 | SluCas9 | − | TAAAAAACAAATTTCGAACCAA | AAGG |
| 4933 | E70Slu19 | exon70 | SluCas9 | − | AGAAGATGTTCGAGACTTTGCC | AAGG |
| 4934 | E70Slu20 | exon70 | SluCas9 | − | TGATCTCCCTTTTAGACTACAT | CAGG |
| 4935 | E71Slu1 | exon71 | SluCas9 | + | AAAAGTACTCACGCAGAATCTA | CTGG |
| 4936 | E71Slu2 | exon71 | SluCas9 | + | TGGCCAGAAGTTGATCAGAGTA | ACGG |
| 4937 | E71Slu3 | exon71 | SluCas9 | + | GGCCAGAAGTTGATCAGAGTAA | CGGG |
| 4938 | E71Slu9 | exon71 | SluCas9 | − | GTCCCGTTACTCTGATCAACTT | CTGG |
| 4939 | E72Slu1 | exon72 | SluCas9 | + | TGAGTATCATCGTGTGAAAGCT | GAGG |
| 4940 | E72Slu2 | exon72 | SluCas9 | + | GAGTATCATCGTGTGAAAGCTG | AGGG |
| 4941 | E72Slu3 | exon72 | SluCas9 | + | AGTATCATCGTGTGAAAGCTGA | GGGG |
| 4942 | E72Slu4 | exon72 | SluCas9 | + | ATCGTGTGAAAGCTGAGGGGAC | GAGG |
| 4943 | E72Slu5 | exon72 | SluCas9 | + | TGTGAAAGCTGAGGGGACGAGG | CAGG |
| 4944 | E72Slu8 | exon72 | SluCas9 | − | CACGCATTGAACATTATGCTAG | CAGG |
| 4945 | E73Slu1 | exon73 | SluCas9 | + | TGGGATACTTACATGCTCTCAT | TAGG |
| 4946 | E73Slu2 | exon73 | SluCas9 | − | CTAGCAGAAATGGAAAACAGCA | ATGG |
| 4947 | E73Slu3 | exon73 | SluCas9 | − | GTTTTTTATCAGGCTAGCAGAA | ATGG |
| 4948 | E74Slu1 | exon74 | SluCas9 | + | TGTTTTCTTCCTCAAGATCTGC | TAGG |
| 4949 | E74Slu2 | exon74 | SluCas9 | + | CTCCCCTCTTTCCTCACTCTCT | AAGG |
| 4950 | E74Slu3 | exon74 | SluCas9 | + | CACTCTCTAAGGAAATCAAGAT | CTGG |
| 4951 | E74Slu4 | exon74 | SluCas9 | + | ACTCTCTAAGGAAATCAAGATC | TGGG |
| 4952 | E74Slu5 | exon74 | SluCas9 | + | TCTAAGGAAATCAAGATCTGGG | CAGG |
| 4953 | E74Slu6 | exon74 | SluCas9 | + | ATCAAGATCTGGGCAGGACTAC | GAGG |
| 4954 | E74Slu7 | exon74 | SluCas9 | + | AGATCTGGGCAGGACTACGAGG | CTGG |
| 4955 | E74Slu8 | exon74 | SluCas9 | + | GGGCAGGACTACGAGGCTGGCT | CAGG |
| 4956 | E74Slu9 | exon74 | SluCas9 | + | GGCAGGACTACGAGGCTGGCTC | AGGG |
| 4957 | E74Slu10 | exon74 | SluCas9 | + | GCAGGACTACGAGGCTGGCTCA | GGGG |
| 4958 | E74Slu11 | exon74 | SluCas9 | + | CAGGACTACGAGGCTGGCTCAG | GGGG |
| 4959 | E74Slu12 | exon74 | SluCas9 | + | AGGACTACGAGGCTGGCTCAGG | GGGG |
| 4960 | E74Slu13 | exon74 | SluCas9 | + | GAGGCTGGCTCAGGGGGGAGTC | CTGG |
| 4961 | E74Slu14 | exon74 | SluCas9 | + | GGGGGGAGTCCTGGTTCAAACT | TTGG |
| 4962 | E74Slu15 | exon74 | SluCas9 | + | GGTTCAAACTTTGGCAGTAATG | CTGG |
| 4963 | E74Slu16 | exon74 | SluCas9 | + | GATTAACAAATGTTCATCATCT | CTGG |
| 4964 | E74Slu20 | exon74 | SluCas9 | − | TAGCAGATCTTGAGGAAGAAAA | CAGG |
| 4965 | E74Slu21 | exon74 | SluCas9 | − | AGAGAGAATCCTAGCAGATCTT | GAGG |
| 4966 | E74Slu22 | exon74 | SluCas9 | − | TTCCTTAGAGAGTGAGGAAAGA | GGGG |
| 4967 | E74S1u23 | exon74 | SluCas9 | − | TTTCCTTAGAGAGTGAGGAAAG | AGGG |
| 4968 | E74Slu24 | exon74 | SluCas9 | − | ATTTCCTTAGAGAGTGAGGAAA | GAGG |
| 4969 | E74Slu25 | exon74 | SluCas9 | − | GATCTTGATTTCCTTAGAGAGT | GAGG |
| 4970 | E74Slu26 | exon74 | SluCas9 | − | GCATTACTGCCAAAGTTTGAAC | CAGG |
| 4971 | E75Slu1 | exon75 | SluCas9 | + | ACTGTGACTCCAGCTGTTTATT | GTGG |
| 4972 | E75Slu2 | exon75 | SluCas9 | + | CCAGCTGTTTATTGTGGTCTTC | CAGG |
| 4973 | E75Slu3 | exon75 | SluCas9 | + | GTGGTCTTCCAGGATTTGCATC | CTGG |
| 4974 | E75Slu4 | exon75 | SluCas9 | + | CCAGGATTTGCATCCTGGCTTC | CAGG |
| 4975 | E75Slu5 | exon75 | SluCas9 | + | GGATTTGCATCCTGGCTTCCAG | GCGG |
| 4976 | E75Slu6 | exon75 | SluCas9 | + | GCCTTTGTGTTGACGCAGTAGC | TTGG |
| 4977 | E75Slu7 | exon75 | SluCas9 | + | CCTCAGCAATGAGCTCAGCATC | CCGG |
| 4978 | E75Slu8 | exon75 | SluCas9 | + | CTCAGCAATGAGCTCAGCATCC | CGGG |
| 4979 | E75Slu9 | exon75 | SluCas9 | + | TCAGCAATGAGCTCAGCATCCC | GGGG |
| 4980 | E75Slu10 | exon75 | SluCas9 | + | TGAGCTCAGCATCCCGGGGACT | CTGG |
| 4981 | E75Slu11 | exon75 | SluCas9 | + | GAGCTCAGCATCCCGGGGACTC | TGGG |
| 4982 | E75Slu12 | exon75 | SluCas9 | + | AGCTCAGCATCCCGGGGACTCT | GGGG |
| 4983 | E75Slu13 | exon75 | SluCas9 | + | AGCATCCCGGGGACTCTGGGGA | GAGG |
| 4984 | E75Slu14 | exon75 | SluCas9 | + | ATCCCGGGGACTCTGGGGAGAG | GTGG |
| 4985 | E75Slu15 | exon75 | SluCas9 | + | TCCCGGGGACTCTGGGGAGAGG | TGGG |
| 4986 | E75Slu16 | exon75 | SluCas9 | + | TGGGGAGAGGTGGGCATCATTT | CAGG |
| 4987 | E75Slu17 | exon75 | SluCas9 | + | GGAGAGGTGGGCATCATTTCAG | GAGG |
| 4988 | E75Slu18 | exon75 | SluCas9 | + | GAGAGGTGGGCATCATTTCAGG | AGGG |
| 4989 | E75Slu19 | exon75 | SluCas9 | + | AGAGGTGGGCATCATTTCAGGA | GGGG |
| 4990 | E75Slu20 | exon75 | SluCas9 | + | GTGGGCATCATTTCAGGAGGGG | ACGG |
| 4991 | E75Slu21 | exon75 | SluCas9 | + | ATCATTTCAGGAGGGGACGGCA | GTGG |
| 4992 | E75Slu22 | exon75 | SluCas9 | + | TCATTTCAGGAGGGGACGGCAG | TGGG |
| 4993 | E75Slu23 | exon75 | SluCas9 | + | CATTTCAGGAGGGGACGGCAGT | GGGG |
| 4994 | E75Slu24 | exon75 | SluCas9 | + | CAGGAGGGGACGGCAGTGGGGA | CAGG |
| 4995 | E75Slu25 | exon75 | SluCas9 | + | TATGTTCGTGCTGCTGCTTTAG | ACGG |
| 4996 | E75Slu26 | exon75 | SluCas9 | + | ATATTCTGCTTGCAGATTCCTA | TTGG |
| 4997 | E75Slu29 | exon75 | SluCas9 | − | TAAGGCAGCTGCTGGAGCAAGT | GAGG |
| 4998 | E75Slu30 | exon75 | SluCas9 | − | GTTACACAGGCTAAGGCAGCTG | CTGG |
| 4999 | E75Slu31 | exon75 | SluCas9 | − | TGGAGTCACAGTTACACAGGCT | AAGG |
| 5000 | E75Slu32 | exon75 | SluCas9 | − | AACAGCTGGAGTCACAGTTACA | CAGG |
| 5001 | E75Slu33 | exon75 | SluCas9 | − | CCTGGAAGACCACAATAAACAG | CTGG |
| 5002 | E75Slu34 | exon75 | SluCas9 | − | CCTGGAAGCCAGGATGCAAATC | CTGG |
| 5003 | E75Slu35 | exon75 | SluCas9 | − | AACACAAAGGCCGCCTGGAAGC | CAGG |
| 5004 | E75Slu36 | exon75 | SluCas9 | − | ACTGCGTCAACACAAAGGCCGC | CTGG |
| 5005 | E75Slu37 | exon75 | SluCas9 | − | GCCAAGCTACTGCGTCAACACA | AAGG |
| 5006 | E75Slu38 | exon75 | SluCas9 | − | CCGGGATGCTGAGCTCATTGCT | GAGG |
| 5007 | E75Slu39 | exon75 | SluCas9 | − | GCCCACCTCTCCCCAGAGTCCC | CGGG |
| 5008 | E75Slu40 | exon75 | SluCas9 | − | TGCCCACCTCTCCCCAGAGTCC | CCGG |
| 5009 | E75Slu41 | exon75 | SluCas9 | − | CTAAAGCAGCAGCACGAACATA | AAGG |
| 5010 | E76Slu2 | exon76 | SluCas9 | + | CCGAAGTTTGACTGCCAACCAC | TCGG |
| 5011 | E76Slu3 | exon76 | SluCas9 | + | CTGCCAACCACTCGGAGCAGCA | TAGG |
| 5012 | E76Slu4 | exon76 | SluCas9 | + | GAGCAGCATAGGCTGACTGCTG | TCGG |
| 5013 | E76Slu5 | exon76 | SluCas9 | + | ACTGCTGTCGGACCTCTGTAGA | GAGG |
| 5014 | E76Slu6 | exon76 | SluCas9 | + | TCGGACCTCTGTAGAGAGGTAG | AAGG |
| 5015 | E76Slu7 | exon76 | SluCas9 | + | CCTCTGTAGAGAGGTAGAAGGA | GAGG |
| 5016 | E76Slu8 | exon76 | SluCas9 | + | GGACACCGTTGTGCCATTCACT | TTGG |
| 5017 | E76Slu9 | exon76 | SluCas9 | + | TGCCATTCACTTTGGCCTCTGC | CTGG |
| 5018 | E76Slu10 | exon76 | SluCas9 | + | GCCATTCACTTTGGCCTCTGCC | TGGG |
| 5019 | E76Slu11 | exon76 | SluCas9 | + | CCATTCACTTTGGCCTCTGCCT | GGGG |
| 5020 | E76Slu12 | exon76 | SluCas9 | − | GGCAGTCAAACTTCGGACTCCA | TGGG |
| 5021 | E76Slu13 | exon76 | SluCas9 | − | TGGCAGTCAAACTTCGGACTCC | ATGG |
| 5022 | E76Slu14 | exon76 | SluCas9 | − | CCGAGTGGTTGGCAGTCAAACT | TCGG |
| 5023 | E76Slu15 | exon76 | SluCas9 | − | CAGCCTATGCTGCTCCGAGTGG | TTGG |
| 5024 | E76Slu16 | exon76 | SluCas9 | − | CAGTCAGCCTATGCTGCTCCGA | GTGG |
| 5025 | E76Slu17 | exon76 | SluCas9 | − | CCTCTCCTTCTACCTCTCTACA | GAGG |
| 5026 | E76Slu18 | exon76 | SluCas9 | − | AGAGGCCAAAGTGAATGGCACA | ACGG |
| 5027 | E76Slu19 | exon76 | SluCas9 | − | CCCCAGGCAGAGGCCAAAGTGA | ATGG |
| 5028 | E76Slu20 | exon76 | SluCas9 | − | TTGGATGACTTAGCCCCAGGCA | GAGG |
| 5029 | E76Slu21 | exon76 | SluCas9 | − | TTTCTTTTGGATGACTTAGCCC | CAGG |
| 5030 | E77Slu1 | exon77 | SluCas9 | + | TATTGGAGCTTACCTCTTGAAC | TAGG |
| 5031 | E77Slu2 | exon77 | SluCas9 | + | ATTGGAGCTTACCTCTTGAACT | AGGG |
| 5032 | E77Slu3 | exon77 | SluCas9 | + | GAGCTTACCTCTTGAACTAGGG | AAGG |
| 5033 | E77Slu4 | exon77 | SluCas9 | + | CCTCTAACCCTGTGCTTGTGTC | CTGG |
| 5034 | E77Slu5 | exon77 | SluCas9 | + | CTCTAACCCTGTGCTTGTGTCC | TGGG |
| 5035 | E77Slu6 | exon77 | SluCas9 | + | TCTAACCCTGTGCTTGTGTCCT | GGGG |
| 5036 | E77Slu7 | exon77 | SluCas9 | + | AACCCTGTGCTTGTGTCCTGGG | GAGG |
| 5037 | E77Slu11 | exon77 | SluCas9 | − | AACAACTCCTTCCCTAGTTCAA | GAGG |
| 5038 | E77Slu12 | exon77 | SluCas9 | − | AAGCACAGGGTTAGAGGAGGTG | ATGG |
| 5039 | E77Slu13 | exon77 | SluCas9 | − | GGACACAAGCACAGGGTTAGAG | GAGG |
| 5040 | E77Slu14 | exon77 | SluCas9 | − | CCAGGACACAAGCACAGGGTTA | GAGG |
| 5041 | E77Slu15 | exon77 | SluCas9 | − | GTCCTCCCCAGGACACAAGCAC | AGGG |
| 5042 | E77Slu16 | exon77 | SluCas9 | − | AGTCCTCCCCAGGACACAAGCA | CAGG |
| 5043 | E77Slu17 | exon77 | SluCas9 | − | GGAAGATCTTCTCAGTCCTCCC | CAGG |
| 5044 | E78Slu1 | exon78 | SluCas9 | + | TGAATCTCACTAACCTCTCTCA | TTGG |
| 5045 | E78Slu2 | exon78 | SluCas9 | + | CTAACCTCTCTCATTGGCTTTC | CAGG |
| 5046 | E78Slu3 | exon78 | SluCas9 | + | TAACCTCTCTCATTGGCTTTCC | AGGG |
| 5047 | E78Slu4 | exon78 | SluCas9 | + | AACCTCTCTCATTGGCTTTCCA | GGGG |
| 5048 | E78Slu10 | exon78 | SluCas9 | − | TACCCCTGGAAAGCCAATGAGA | GAGG |
| 5049 | E78Slu11 | exon78 | SluCas9 | − | ATTATTAAAGGAAGAAATACCC | CTGG |
| 5050 | E79Slu1 | exon79 | SluCas9 | + | AGCAGTACTATAATACAATAGT | AAGG |
| 5051 | E79Slu2 | exon79 | SluCas9 | + | AATACAATAGTAAGGCATATAT | TTGG |
| 5052 | E79Slu3 | exon79 | SluCas9 | + | ATAATTCGTAAATGTTACAGTG | TTGG |
| 5053 | E79Slu4 | exon79 | SluCas9 | + | ATTATGATTTACAGTTTAATAC | TTGG |
| 5054 | E79Slu5 | exon79 | SluCas9 | + | ATGATTTACAGTTTAATACTTG | GTGG |
| 5055 | E79Slu6 | exon79 | SluCas9 | + | CTTACTTACTTAAACTTCTTAG | TAGG |
| 5056 | E79Slu7 | exon79 | SluCas9 | + | TAAATCTGAGTTTTAAAAATCC | TTGG |
| 5057 | E79Slu8 | exon79 | SluCas9 | + | AAATCTGAGTTTTAAAAATCCT | TGGG |
| 5058 | E79Slu9 | exon79 | SluCas9 | + | TTAAAAATCCTTGGGTAAAGAA | AAGG |
| 5059 | E79Slu10 | exon79 | SluCas9 | + | AGAAAAGGTCCAGCGTCACATA | AAGG |
| 5060 | E79Slu11 | exon79 | SluCas9 | + | AAAAACCAAATCTTCATGTAAT | TTGG |
| 5061 | E79Slu12 | exon79 | SluCas9 | + | GGTAATTTGTTACCTTAGAGCT | TTGG |
| 5062 | E79Slu13 | exon79 | SluCas9 | + | GTAATTTGTTACCTTAGAGCTT | TGGG |
| 5063 | E79Slu14 | exon79 | SluCas9 | + | GGGTTTTCTTTTGAAAATTATG | AAGG |
| 5064 | E79Slu15 | exon79 | SluCas9 | + | GAAGGAAAAAGAAAGAATTATA | AAGG |
| 5065 | E79Slu16 | exon79 | SluCas9 | + | AAAGGAAAAAGAAAATAACGCA | ATGG |
| 5066 | E79Slu17 | exon79 | SluCas9 | + | AAGAAAATAACGCAATGGACAA | GTGG |
| 5067 | E79Slu18 | exon79 | SluCas9 | + | ACAAGTGGTGAAGCTGTGAACT | CAGG |
| 5068 | E79Slu19 | exon79 | SluCas9 | + | GAACTCAGGTGTGCACAATTAT | CAGG |
| 5069 | E79Slu20 | exon79 | SluCas9 | + | AGGAACACCCCAAAACCAAAGT | GAGG |
| 5070 | E79Slu21 | exon79 | SluCas9 | + | GTTAATTAATTAATTATTAATA | ATGG |
| 5071 | E79Slu22 | exon79 | SluCas9 | + | AAGCTAATTACACTTGATGTCA | GAGG |
| 5072 | E79Slu23 | exon79 | SluCas9 | + | AGGTAACAGATTTGCAAAATTA | TAGG |
| 5073 | E79Slu24 | exon79 | SluCas9 | + | GATTTGCAAAATTATAGGTCAC | ACGG |
| 5074 | E79Slu25 | exon79 | SluCas9 | + | TTGCAAAATTATAGGTCACACG | GTGG |
| 5075 | E79Slu26 | exon79 | SluCas9 | + | TTAAAAATCAAAAAGAAATAAA | ATGG |
| 5076 | E79Slu27 | exon79 | SluCas9 | + | TTAACCTGTCTAATCCACCAAG | AAGG |
| 5077 | E79Slu28 | exon79 | SluCas9 | + | TAACCTGTCTAATCCACCAAGA | AGGG |
| 5078 | E79Slu29 | exon79 | SluCas9 | + | TCTTACTTACTTACAAACCTGT | GTGG |
| 5079 | E79Slu30 | exon79 | SluCas9 | + | GAACTACTCGCAGAGAAATGCA | AAGG |
| 5080 | E79Slu31 | exon79 | SluCas9 | + | TACTCGCAGAGAAATGCAAAGG | ATGG |
| 5081 | E79Slu32 | exon79 | SluCas9 | + | GCAAAGGATGGAAACACAGTTC | ATGG |
| 5082 | E79Slu33 | exon79 | SluCas9 | + | CAAAGGATGGAAACACAGTTCA | TGGG |
| 5083 | E79Slu34 | exon79 | SluCas9 | + | TGGAAACACAGTTCATGGGCTT | CTGG |
| 5084 | E79Slu35 | exon79 | SluCas9 | + | GGAAACACAGTTCATGGGCTTC | TGGG |
| 5085 | E79Slu36 | exon79 | SluCas9 | + | ACCTGTCAGTATCACAAATGTG | ATGG |
| 5086 | E79Slu37 | exon79 | SluCas9 | + | CCTGTCAGTATCACAAATGTGA | TGGG |
| 5087 | E79Slu38 | exon79 | SluCas9 | + | CTGTCAGTATCACAAATGTGAT | GGGG |
| 5088 | E79Slu39 | exon79 | SluCas9 | + | TATTTATTTTAAATTATGTCTT | GTGG |
| 5089 | E79Slu40 | exon79 | SluCas9 | + | GGCATTTAAAAACTCATCCCAC | ATGG |
| 5090 | E79Slu41 | exon79 | SluCas9 | + | GCATTTAAAAACTCATCCCACA | TGGG |
| 5091 | E79Slu42 | exon79 | SluCas9 | + | CAGTTCCTTTTGACTGTGAGAA | GAGG |
| 5092 | E79Slu43 | exon79 | SluCas9 | + | AGTTCCTTTTGACTGTGAGAAG | AGGG |
| 5093 | E79Slu44 | exon79 | SluCas9 | + | CATCCAATCCTTCACTTAAAGA | GTGG |
| 5094 | E79Slu45 | exon79 | SluCas9 | + | TAAAGAGTGGCCTACTCCTTCA | CAGG |
| 5095 | E79Slu46 | exon79 | SluCas9 | + | AAAGAGTGGCCTACTCCTTCAC | AGGG |
| 5096 | E79Slu47 | exon79 | SluCas9 | + | AGTGGCCTACTCCTTCACAGGG | ATGG |
| 5097 | E79Slu48 | exon79 | SluCas9 | + | GTGGCCTACTCCTTCACAGGGA | TGGG |
| 5098 | E79Slu49 | exon79 | SluCas9 | + | CCTACTCCTTCACAGGGATGGG | CTGG |
| 5099 | E79Slu50 | exon79 | SluCas9 | + | CTACTCCTTCACAGGGATGGGC | TGGG |
| 5100 | E79Slu51 | exon79 | SluCas9 | + | CCTATCATCGTCCTGCTACTGC | TTGG |
| 5101 | E79Slu52 | exon79 | SluCas9 | + | CTATCATCGTCCTGCTACTGCT | TGGG |
| 5102 | E79Slu53 | exon79 | SluCas9 | + | AAAAATACCTTCTGATGTTCAC | AAGG |
| 5103 | E79Slu54 | exon79 | SluCas9 | + | GAAGCATCATTAAATCTAAATC | GTGG |
| 5104 | E79Slu55 | exon79 | SluCas9 | + | TAAATCGTGGCATTGCTAGCAG | CAGG |
| 5105 | E79Slu56 | exon79 | SluCas9 | + | CTTTACTTTACTTTCGTTGTCA | GTGG |
| 5106 | E79Slu57 | exon79 | SluCas9 | + | AGTTGTTTAAAATGAGAAACAT | CTGG |
| 5107 | E79Slu58 | exon79 | SluCas9 | + | GAGCTGTAGACAATGTTTTAGT | GTGG |
| 5108 | E79Slu59 | exon79 | SluCas9 | 1 | TTTAGTGTGGTGTAGTTTCCTC | CTGG |
| 5109 | E79Slu60 | exon79 | SluCas9 | + | TGGTGTAGTTTCCTCCTGGCTT | CCGG |
| 5110 | E79Slu61 | exon79 | SluCas9 | + | AGTTTCCTCCTGGCTTCCGGCT | CCGG |
| 5111 | E79Slu62 | exon79 | SluCas9 | + | GTTTCCTCCTGGCTTCCGGCTC | CGGG |
| 5112 | E79Slu63 | exon79 | SluCas9 | + | GAAAAATCCATTCTAGACCAAG | CAGG |
| 5113 | E79Slu64 | exon79 | SluCas9 | + | ATTCTAGACCAAGCAGGTAAGC | CTGG |
| 5114 | E79Slu65 | exon79 | SluCas9 | + | ACTAGAAGTAATTTCTTTCTAT | TAGG |
| 5115 | E79Slu66 | exon79 | SluCas9 | + | ATGTGACATGAACATTTAAAAA | ATGG |
| 5116 | E79Slu67 | exon79 | SluCas9 | + | ATGAGCAGTGTGTAGTAGTCAT | TTGG |
| 5117 | E79Slu68 | exon79 | SluCas9 | + | CAGTGTGTAGTAGTCATTTGGT | GTGG |
| 5118 | E79Slu69 | exon79 | SluCas9 | + | TGTGTAGTAGTCATTTGGTGTG | GTGG |
| 5119 | E79Slu70 | exon79 | SluCas9 | + | GTAGTCATTTGGTGTGGTGGTA | GAGG |
| 5120 | E79Slu71 | exon79 | SluCas9 | + | AAGAAAAAGCCATGAATTTCAT | ATGG |
| 5121 | E79Slu72 | exon79 | SluCas9 | + | TTTCATATGGATATCACGCCAA | AAGG |
| 5122 | E79Slu73 | exon79 | SluCas9 | + | GTGTGTGTGTTTGTTTTGTTTT | TAGG |
| 5123 | E79Slu74 | exon79 | SluCas9 | + | TGTGTGTGTTTGTTTTGTTTTT | AGGG |
| 5124 | E79Slu75 | exon79 | SluCas9 | + | GTGTGTGTTTGTTTTGTTTTTA | GGGG |
| 5125 | E79Slu76 | exon79 | SluCas9 | + | AAAATGCGTTCCATATAAAGAA | ATGG |
| 5126 | E79Slu77 | exon79 | SluCas9 | + | GTATGAATATTATAAAAACCAT | GCGG |
| 5127 | E79Slu78 | exon79 | SluCas9 | + | TATGAATATTATAAAAACCATG | CGGG |
| 5128 | E79Slu79 | exon79 | SluCas9 | + | ATTATAAAAACCATGCGGGAAT | CAGG |
| 5129 | E79Slu80 | exon79 | SluCas9 | + | TTCATCTGTCATGACTGATACT | AAGG |
| 5130 | E79Slu81 | exon79 | SluCas9 | + | CTCTGCCCAAATCATCTGCCAT | GTGG |
| 5131 | E79Slu82 | exon79 | SluCas9 | + | AAAAGACTTCCTACATTGTGTC | CTGG |
| 5132 | E79Slu84 | exon79 | SluCas9 | − | TGGCATGTTTTGTCATTGTTTT | CAGG |
| 5133 | E79Slu85 | exon79 | SluCas9 | − | GTAACTGAAGCATAAACATCAC | ATGG |
| 5134 | E79Slu86 | exon79 | SluCas9 | − | CTGCATTTTAAGCATAATTAAT | TTGG |
| 5135 | E79Slu87 | exon79 | SluCas9 | − | TTTTCTTTTAGACACATTAGCT | CTGG |
| 5136 | E79Slu88 | exon79 | SluCas9 | − | AGTAAGTTTCATTCTAAAATCA | GAGG |
| 5137 | E79Slu89 | exon79 | SluCas9 | − | TTAAAACTCAGATTTAAAACAA | GGGG |
| 5138 | E79Slu90 | exon79 | SluCas9 | − | TTTAAAACTCAGATTTAAAACA | AGGG |
| 5139 | E79Slu91 | exon79 | SluCas9 | − | TTTTAAAACTCAGATTTAAAAC | AAGG |
| 5140 | E79Slu92 | exon79 | SluCas9 | − | ACGCTGGACCTTTTCTTTACCC | AAGG |
| 5141 | E79Slu93 | exon79 | SluCas9 | − | CATTTTTTTCCTTTATGTGACG | CTGG |
| 5142 | E79Slu94 | exon79 | SluCas9 | − | AATTACCAAATTACATGAAGAT | TTGG |
| 5143 | E79Slu95 | exon79 | SluCas9 | − | TCAAAAGAAAACCCAAAGCTCT | AAGG |
| 5144 | E79Slu96 | exon79 | SluCas9 | − | ATTTCTACCTCACTTTGGTTTT | GGGG |
| 5145 | E79Slu97 | exon79 | SluCas9 | − | TATTTCTACCTCACTTTGGTTT | TGGG |
| 5146 | E79Slu98 | exon79 | SluCas9 | − | CTATTTCTACCTCACTTTGGTT | TTGG |
| 5147 | E79Slu99 | exon79 | SluCas9 | − | CTCATGCTATTTCTACCTCACT | TTGG |
| 5148 | E79Slu100 | exon79 | SluCas9 | − | AATTAATTAATTAACATCAAAC | ACGG |
| 5149 | E79Slu101 | exon79 | SluCas9 | − | AGTGTAATTAGCTTTTGGAGAG | TGGG |
| 5150 | E79Slu102 | exon79 | SluCas9 | − | AAGTGTAATTAGCTTTTGGAGA | GTGG |
| 5151 | E79Slu103 | exon79 | SluCas9 | − | TGACATCAAGTGTAATTAGCTT | TTGG |
| 5152 | E79Slu104 | exon79 | SluCas9 | − | AGTGTAATTAGCTTTTGGAGAG | TGGG |
| 5153 | E79Slu105 | exon79 | SluCas9 | − | AAGTGTAATTAGCTTTTGGAGA | GTGG |
| 5154 | E79Slu106 | exon79 | SluCas9 | − | TGACATCAAGTGTAATTAGCTT | TTGG |
| 5155 | E79Slu107 | exon79 | SluCas9 | − | AAGAGGAAAAGCTAAGGACTGG | TAGG |
| 5156 | E79Slu108 | exon79 | SluCas9 | − | GCTCAAGAGGAAAAGCTAAGGA | CTGG |
| 5157 | E79Slu109 | exon79 | SluCas9 | − | GAAAAGCTCAAGAGGAAAAGCT | AAGG |
| 5158 | E79Slu110 | exon79 | SluCas9 | − | AAAAAAGAGGAGAAAAGCTCAA | GAGG |
| 5159 | E79Slu111 | exon79 | SluCas9 | − | CAAACAAAAATTGCTCAAAAAA | GAGG |
| 5160 | E79Slu112 | exon79 | SluCas9 | − | AAACCCTTCTTGGTGGATTAGA | CAGG |
| 5161 | E79Slu113 | exon79 | SluCas9 | − | TGTTACAAAAAAACCCTTCTTG | GTGG |
| 5162 | E79Slu114 | exon79 | SluCas9 | − | AAATGTTACAAAAAAACCCTTC | TTGG |
| 5163 | E79Slu115 | exon79 | SluCas9 | − | GGTTTGTAAGTAAGTAAGAAAG | AAGG |
| 5164 | E79Slu116 | exon79 | SluCas9 | − | TTTCTCTGCGAGTAGTTCCACA | CAGG |
| 5165 | E79Slu117 | exon79 | SluCas9 | − | CCCATCACATTTGTGATACTGA | CAGG |
| 5166 | E79Slu118 | exon79 | SluCas9 | − | TAAAATAAATAAACTTTGGGAA | AAGG |
| 5167 | E79Slu119 | exon79 | SluCas9 | − | ATAATTTAAAATAAATAAACTT | TGGG |
| 5168 | E79Slu120 | exon79 | SluCas9 | − | CATAATTTAAAATAAATAAACT | TTGG |
| 5169 | E79Slu121 | exon79 | SluCas9 | − | TTTTTAGATTTATTGTCCCATG | TGGG |
| 5170 | E79Slu122 | exon79 | SluCas9 | − | TTTTTTAGATTTATTGTCCCAT | GTGG |
| 5171 | E79Slu123 | exon79 | SluCas9 | − | CAGTCAAAAGGAACTGGGTGGT | TTGG |
| 5172 | E79Slu124 | exon79 | SluCas9 | − | TCTCACAGTCAAAAGGAACTGG | GTGG |
| 5173 | E79Slu125 | exon79 | SluCas9 | − | TCTTCTCACAGTCAAAAGGAAC | TGGG |
| 5174 | E79Slu126 | exon79 | SluCas9 | − | CTCTTCTCACAGTCAAAAGGAA | CTGG |
| 5175 | E79Slu127 | exon79 | SluCas9 | − | TATGCCCTCTTCTCACAGTCAA | AAGG |
| 5176 | E79Slu128 | exon79 | SluCas9 | − | AGGCCACTCTTTAAGTGAAGGA | TTGG |
| 5177 | E79Slu129 | exon79 | SluCas9 | − | GGAGTAGGCCACTCTTTAAGTG | AAGG |
| 5178 | E79Slu130 | exon79 | SluCas9 | − | CCAGCCCATCCCTGTGAAGGAG | TAGG |
| 5179 | E79Slu131 | exon79 | SluCas9 | − | GGATTCCCAGCCCATCCCTGTG | AAGG |
| 5180 | E79Slu132 | exon79 | SluCas9 | − | ACGATGATAGGGCTGGAGGGCT | ATGG |
| 5181 | E79Slu133 | exon79 | SluCas9 | − | AGCAGGACGATGATAGGGCTGG | AGGG |
| 5182 | E79Slu134 | exon79 | SluCas9 | − | TAGCAGGACGATGATAGGGCTG | GAGG |
| 5183 | E79Slu135 | exon79 | SluCas9 | − | CAGTAGCAGGACGATGATAGGG | CTGG |
| 5184 | E79Slu136 | exon79 | SluCas9 | − | CAAGCAGTAGCAGGACGATGAT | AGGG |
| 5185 | E79Slu137 | exon79 | SluCas9 | − | CCAAGCAGTAGCAGGACGATGA | TAGG |
| 5186 | E79Slu138 | exon79 | SluCas9 | − | TTTTTTAACTCCCAAGCAGTAG | CAGG |
| 5187 | E79Slu139 | exon79 | SluCas9 | − | ATTCTGACCTTGTGAACATCAG | AAGG |
| 5188 | E79Slu140 | exon79 | SluCas9 | − | TGCTTCAGTGGAAATCAATCAG | AAGG |
| 5189 | E79Slu141 | exon79 | SluCas9 | − | ATTTAGATTTAATGATGCTTCA | GTGG |
| 5190 | E79Slu142 | exon79 | SluCas9 | − | ATCAGAGTGAGTAATCGGTTGG | TTGG |
| 5191 | E79Slu143 | exon79 | SluCas9 | − | TTATATCAGAGTGAGTAATCGG | TTGG |
| 5192 | E79Slu144 | exon79 | SluCas9 | − | CTTATTATATCAGAGTGAGTAA | TCGG |
| 5193 | E79Slu145 | exon79 | SluCas9 | − | AGGGAACATGTGAATGAATACA | CAGG |
| 5194 | E79Slu146 | exon79 | SluCas9 | − | GTAAAGTATTGGATTTTTTTAA | AGGG |
| 5195 | E79Slu147 | exon79 | SluCas9 | − | AGTAAAGTATTGGATTTTTTTA | AAGG |
| 5196 | E79Slu148 | exon79 | SluCas9 | − | ACAACGAAAGTAAAGTAAAGTA | TTGG |
| 5197 | E79Slu149 | exon79 | SluCas9 | − | TTTTCCCGGAGCCGGAAGCCAG | GAGG |
| 5198 | E79Slu150 | exon79 | SluCas9 | − | GATTTTTCCCGGAGCCGGAAGC | CAGG |
| 5199 | E79Slu151 | exon79 | SluCas9 | − | CTAGAATGGATTTTTCCCGGAG | CCGG |
| 5200 | E79Slu152 | exon79 | SluCas9 | − | CTTGGTCTAGAATGGATTTTTC | CCGG |
| 5201 | E79Slu153 | exon79 | SluCas9 | − | AGGCTTACCTGCTTGGTCTAGA | ATGG |
| 5202 | E79Slu154 | exon79 | SluCas9 | − | TCAGTCATCCAGGCTTACCTGC | TTGG |
| 5203 | E79Slu155 | exon79 | SluCas9 | − | AAATTACTTCTAGTCAGTCATC | CAGG |
| 5204 | E79Slu156 | exon79 | SluCas9 | − | GAGAACTGTCAGCTGAGTGGGG | CAGG |
| 5205 | E79Slu157 | exon79 | SluCas9 | − | ATTTGAGAACTGTCAGCTGAGT | GGGG |
| 5206 | E79Slu158 | exon79 | SluCas9 | − | CATTTGAGAACTGTCAGCTGAG | TGGG |
| 5207 | E79Slu159 | exon79 | SluCas9 | − | TCATTTGAGAACTGTCAGCTGA | GTGG |
| 5208 | E79Slu160 | exon79 | SluCas9 | − | GCGTGATATCCATATGAAATTC | ATGG |
| 5209 | E79Slu161 | exon79 | SluCas9 | − | CAGCGCATTGTTTTGCATCCTT | TTGG |
| 5210 | E79Slu162 | exon79 | SluCas9 | − | ACACACACACACACAAAACTTT | GAGG |
| 5211 | E79Slu163 | exon79 | SluCas9 | − | TTTCTTTATATGGAACGCATTT | TGGG |
| 5212 | E79Slu164 | exon79 | SluCas9 | − | ATTTCTTTATATGGAACGCATT | TTGG |
| 5213 | E79Slu165 | exon79 | SluCas9 | − | AAATAACTTGCCATTTCTTTAT | ATGG |
| 5214 | E79Slu166 | exon79 | SluCas9 | − | GTTATTGTTTTGTTAACAATGG | CAGG |
| 5215 | E79Slu167 | exon79 | SluCas9 | − | GTCTGTTATTGTTTTGTTAACA | ATGG |
| 5216 | E79Slu168 | exon79 | SluCas9 | − | ATCTATATTTTTGTGAAGGGTA | GTGG |
| 5217 | E79Slu169 | exon79 | SluCas9 | − | AAATAAATCTATATTTTTGTGA | AGGG |
| 5218 | E79Slu170 | exon79 | SluCas9 | − | GAAATAAATCTATATTTTTGTG | AAGG |
| 5219 | E79Slu171 | exon79 | SluCas9 | − | TTTATAATATTCATACAACAAA | GAGG |
| 5220 | E79Slu172 | exon79 | SluCas9 | − | TTTTACAACTCCTGATTCCCGC | ATGG |
| 5221 | E79Slu173 | exon79 | SluCas9 | − | GTATCAGTCATGACAGATGAAG | AAGG |
| 5222 | E79Slu174 | exon79 | SluCas9 | − | GGCAGATGATTTGGGCAGAGCG | ATGG |
| 5223 | E79Slu175 | exon79 | SluCas9 | − | CTTTTCCACATGGCAGATGATT | TGGG |
| 5224 | E79Slu176 | exon79 | SluCas9 | − | TCTTTTCCACATGGCAGATGAT | TTGG |
| 5225 | E79Slu177 | exon79 | SluCas9 | − | CAATGTAGGAAGTCTTTTCCAC | ATGG |
| 5226 | E79Slu178 | exon79 | SluCas9 | − | CTTTGTTTTCCAGGACACAATG | TAGG |

### Compositions

[0089] In some embodiments, a composition is provided comprising one or more guide RNAs, or one or more nucleic acids encoding one or more guide RNAs, comprising or consisting of one or more guide sequence of Table 1A (SEQ ID NOs: 1000-3081 for SaCas9) or Table 1B (SEQ ID NOs: 4000-5226 for SluCas9). Tables 1A-B provide the endonuclease associated with each guide sequence such that for each guide sequence described herein the type of endonuclease to be paired with the guide (for compositions) or used with the guide (for methods/uses) can be determined.

[0090] In some embodiments, a composition is provided comprising one or more guide RNAs, or one or more nucleic acids encoding one or more guide RNAs, wherein the guide RNA comprises at least 16, 17, 18, 19, or 20 contiguous nucleotides of a guide sequence of Tables 1A-B, or is at least 70%, at least 75%, at least 80%, at least 85%, or at least 90% identical to a guide sequence comprising at least 16, 17, 18, 19, or 20 nucleotides of a guide sequence of Tables 1A-B. In particular embodiments, a composition is provided comprising one or more guide RNAs, or one or more nucleic acids encoding one or more guide RNAs, wherein the guide RNA comprises at least 20 contiguous nucleotides of a guide sequence of Tables 1A-B, or is at least 70%, at least 75%, at least 80%, at least 85%, or at least 90% identical to guide sequence comprising at least 20 nucleotides of a guide sequence of Tables 1A-B. In other particular embodiments, a composition is provided comprising one or more guide RNAs, or one or more nucleic acids encoding one or more guide RNAs, wherein the guide RNA comprises no more than 16, no more than 17, no more than 18, no more than 19, no more than 20, no more than 21, or no more than 22 contiguous nucleotides of a guide sequence of Tables 1A-B, or is at least 70%, at least 75%, at least 80%, at least 85%, or at least 90% identical to guide sequence comprising no more than 16, no more than 17, no more than 18, no more than 19, no more than 20, no more than 21, or no more than 22 contiguous nucleotides of a guide sequence of Tables 1A-B.

[0091] In some embodiments, a composition is provided comprising two or more guide RNAs, or nucleic acid encoding two or more guide RNAs, wherein each guide RNA comprises a guide sequence of Tables 1A-B, or at least 16, 17, 18, 19, or 20 contiguous nucleotides of a guide sequence of Tables 1A-B, or is at least 70%, at least 75%, at least 80%, at least 85%, or at least 90% identical to a guide sequence comprising at least 16, 17, 18, 19, or 20 nucleotides of a guide sequence selected from Tables 1A-B. In particular embodiments, a composition is provided comprising two or more guide RNAs, or nucleic acid encoding two or more guide RNAs, wherein each guide RNA comprises at least 20 contiguous nucleotides of a guide sequence of Tables 1A-B, or is at least 70%, at least 75%, at least 80%, at least 85%, or at least 90% identical to a guide sequence comprising at least 20 nucleotides of a guide sequence selected from Tables 1A-B. In other particular embodiments, a composition is provided comprising two or more guide RNAs, or nucleic acid encoding two or more guide RNAs, wherein at least one of the two or more guide RNAs, optionally each guide RNA, comprises no more than 16, no more than 17, no more than 18, no more than 19, no more than 20, no more than 21, or no more than 22 contiguous nucleotides of a guide sequence of Tables 1A-B, or is at least 70%, at least 75%, at least 80%, at least 85%, or at least 90% identical to a guide sequence comprising no more than 16, no more than 17, no more than 18, no more than 19, no more than 20, no more than 21, or no more than 22 nucleotides of a guide sequence selected from Tables 1A-B.

[0092] In some embodiments, a composition is provided comprising one or more nucleic acid molecules, wherein at least one of the molecules comprises nucleic acid encoding: a) a SaCas9 or SluCas9; and b) a first and a second guide RNA comprising a first and a second guide sequence, wherein the first and second guide sequence are selected from any one of the guide sequences of Tables 1A-B.

[0093] In some embodiments, a composition is provided comprising two nucleic acid molecules, wherein at least one of the molecules comprises a nucleic acid encoding a first and a second guide RNA comprising a first and a second guide sequence, wherein the first and second guide sequence are selected from any one of the guide sequences of Tables 1A-B, optionally wherein the nucleic acid does not comprise a nucleic acid encoding an endonuclease.

[0094] In some embodiments, a composition is provided comprising a pair of guide RNAs, or nucleic acid encoding a pair of guide RNAs, wherein the pair of guide RNAs comprises or consists of any two of the guide sequences of Tables 1A (for SaCas9) or 1B (for SluCas9) for exon 1. In some embodiments, a composition is provided comprising a pair of guide RNAs, or nucleic acid encoding a pair of guide RNAs, wherein the pair of guide RNAs comprises or consists of any two of the guide sequences of Tables 1A (for SaCas9) or 1B (for SluCas9) for exon 2. In some embodiments, a composition is provided comprising a pair of guide RNAs, or nucleic acid encoding a pair of guide RNAs, wherein the pair of guide RNAs comprises or consists of any two of the guide sequences of Tables 1A (for SaCas9) or 1B (for SluCas9) for exon 3. In some embodiments, a composition is provided comprising a pair of guide RNAs, or nucleic acid encoding a pair of guide RNAs, wherein the pair of guide RNAs comprises or consists of any two of the guide sequences of Tables 1A (for SaCas9) or 1B (for SluCas9) for exon: 4. In some embodiments, a composition is provided comprising a pair of guide RNAs, or nucleic acid encoding a pair of guide RNAs, wherein the pair of guide RNAs comprises or consists of any two of the guide sequences of Tables 1A (for SaCas9) or 1B (for SluCas9) for exon: 5. In some embodiments, a composition is provided comprising a pair of guide RNAs, or nucleic acid encoding a pair of guide RNAs, wherein the pair of guide RNAs comprises or consists of any two of the guide sequences of Tables 1A (for SaCas9) or 1B (for SluCas9) for exon: 6. In some embodiments, a composition is provided comprising a pair of guide RNAs, or nucleic acid encoding a pair of guide RNAs, wherein the pair of guide RNAs comprises or consists of any two of the guide sequences of Tables 1A (for SaCas9) or 1B (for SluCas9) for exon: 7. In some embodiments, a composition is provided comprising a pair of guide RNAs, or nucleic acid encoding a pair of guide RNAs, wherein the pair of guide RNAs comprises or consists of any two of the guide sequences of Tables 1A (for SaCas9) or 1B (for SluCas9) for exon: 8. In some embodiments, a composition is provided comprising a pair of guide RNAs, or nucleic acid encoding a pair of guide RNAs, wherein the pair of guide RNAs comprises or consists of any two of the guide sequences of Tables 1A (for SaCas9) or 1B (for SluCas9) for exon: 9. In some embodiments, a composition is provided comprising a pair of guide RNAs, or nucleic acid encoding a pair of guide RNAs, wherein the pair of guide RNAs comprises or consists of any two of the guide sequences of Tables 1A (for SaCas9) or 1B (for SluCas9) for exon: 10. In some embodiments, a composition is provided comprising a pair of guide RNAs, or nucleic acid encoding a pair of guide RNAs, wherein the pair of guide RNAs comprises or consists of any two of the guide sequences of Tables 1A (for SaCas9) or 1B (for SluCas9) for exon: 11. In some embodiments, a composition is provided comprising a pair of guide RNAs, or nucleic acid encoding a pair of guide RNAs, wherein the pair of guide RNAs comprises or consists of any two of the guide sequences of Tables 1A (for SaCas9) or 1B (for SluCas9) for exon: 12. In some embodiments, a composition is provided comprising a pair of guide RNAs, or nucleic acid encoding a pair of guide RNAs, wherein the pair of guide RNAs comprises or consists of any two of the guide sequences of Tables 1A (for SaCas9) or 1B (for SluCas9) for exon: 13. In some embodiments, a composition is provided comprising a pair of guide RNAs, or nucleic acid encoding a pair of guide RNAs, wherein the pair of guide RNAs comprises or consists of any two of the guide sequences of Tables 1A (for SaCas9) or 1B (for SluCas9) for exon: 14. In some embodiments, a composition is provided comprising a pair of guide RNAs, or nucleic acid encoding a pair of guide RNAs, wherein the pair of guide RNAs comprises or consists of any two of the guide sequences of Tables 1A (for SaCas9) or 1B (for SluCas9) for exon: 15. In some embodiments, a composition is provided comprising a pair of guide RNAs, or nucleic acid encoding a pair of guide RNAs, wherein the pair of guide RNAs comprises or consists of any two of the guide sequences of Tables 1A (for SaCas9) or 1B (for SluCas9) for exon: 16. In some embodiments, a composition is provided comprising a pair of guide RNAs, or nucleic acid encoding a pair of guide RNAs, wherein the pair of guide RNAs comprises or consists of any two of the guide sequences of Tables 1A (for SaCas9) or 1B (for SluCas9) for exon: 17. In some embodiments, a composition is provided comprising a pair of guide RNAs, or nucleic acid encoding a pair of guide RNAs, wherein the pair of guide RNAs comprises or consists of any two of the guide sequences of Tables 1A (for SaCas9) or 1B (for SluCas9) for exon: 18. In some embodiments, a composition is provided comprising a pair of guide RNAs, or nucleic acid encoding a pair of guide RNAs, wherein the pair of guide RNAs comprises or consists of any two of the guide sequences of Tables 1A (for SaCas9) or 1B (for SluCas9) for exon: 19. In some embodiments, a composition is provided comprising a pair of guide RNAs, or nucleic acid encoding a pair of guide RNAs, wherein the pair of guide RNAs comprises or consists of any two of the guide sequences of Tables 1A (for SaCas9) or 1B (for SluCas9) for exon: 20. In some embodiments, a composition is provided comprising a pair of guide RNAs, or nucleic acid encoding a pair of guide RNAs, wherein the pair of guide RNAs comprises or consists of any two of the guide sequences of Tables 1A (for SaCas9) or 1B (for SluCas9) for exon: 21. In some embodiments, a composition is provided comprising a pair of guide RNAs, or nucleic acid encoding a pair of guide RNAs, wherein the pair of guide RNAs comprises or consists of any two of the guide sequences of Tables 1A (for SaCas9) or 1B (for SluCas9) for exon: 22. In some embodiments, a composition is provided comprising a pair of guide RNAs, or nucleic acid encoding a pair of guide RNAs, wherein the pair of guide RNAs comprises or consists of any two of the guide sequences of Tables 1A (for SaCas9) or 1B (for SluCas9) for exon: 23. In some embodiments, a composition is provided comprising a pair of guide RNAs, or nucleic acid encoding a pair of guide RNAs, wherein the pair of guide RNAs comprises or consists of any two of the guide sequences of Tables 1A (for SaCas9) or 1B (for SluCas9) for exon: 24. In some embodiments, a composition is provided comprising a pair of guide RNAs, or nucleic acid encoding a pair of guide RNAs, wherein the pair of guide RNAs comprises or consists of any two of the guide sequences of Tables 1A (for SaCas9) or 1B (for SluCas9) for exon: 25. In some embodiments, a composition is provided comprising a pair of guide RNAs, or nucleic acid encoding a pair of guide RNAs, wherein the pair of guide RNAs comprises or consists of any two of the guide sequences of Tables 1A (for SaCas9) or 1B (for SluCas9) for exon: 26. In some embodiments, a composition is provided comprising a pair of guide RNAs, or nucleic acid encoding a pair of guide RNAs, wherein the pair of guide RNAs comprises or consists of any two of the guide sequences of Tables 1A (for SaCas9) or 1B (for SluCas9) for exon: 27. In some embodiments, a composition is provided comprising a pair of guide RNAs, or nucleic acid encoding a pair of guide RNAs, wherein the pair of guide RNAs comprises or consists of any two of the guide sequences of Tables 1A (for SaCas9) or 1B (for SluCas9) for exon: 28. In some embodiments, a composition is provided comprising a pair of guide RNAs, or nucleic acid encoding a pair of guide RNAs, wherein the pair of guide RNAs comprises or consists of any two of the guide sequences of Tables 1A (for SaCas9) or 1B (for SluCas9) for exon: 29. In some embodiments, a composition is provided comprising a pair of guide RNAs, or nucleic acid encoding a pair of guide RNAs, wherein the pair of guide RNAs comprises or consists of any two of the guide sequences of Tables 1A (for SaCas9) or 1B (for SluCas9) for exon: 30. In some embodiments, a composition is provided comprising a pair of guide RNAs, or nucleic acid encoding a pair of guide RNAs, wherein the pair of guide RNAs comprises or consists of any two of the guide sequences of Tables 1A (for SaCas9) or 1B (for SluCas9) for exon: 31. In some embodiments, a composition is provided comprising a pair of guide RNAs, or nucleic acid encoding a pair of guide RNAs, wherein the pair of guide RNAs comprises or consists of any two of the guide sequences of Tables 1A (for SaCas9) or 1B (for SluCas9) for exon: 32. In some embodiments, a composition is provided comprising a pair of guide RNAs, or nucleic acid encoding a pair of guide RNAs, wherein the pair of guide RNAs comprises or consists of any two of the guide sequences of Tables 1A (for SaCas9) or 1B (for SluCas9) for exon: 33. In some embodiments, a composition is provided comprising a pair of guide RNAs, or nucleic acid encoding a pair of guide RNAs, wherein the pair of guide RNAs comprises or consists of any two of the guide sequences of Tables 1A (for SaCas9) or 1B (for SluCas9) for exon: 34. In some embodiments, a composition is provided comprising a pair of guide RNAs, or nucleic acid encoding a pair of guide RNAs, wherein the pair of guide RNAs comprises or consists of any two of the guide sequences of Tables 1A (for SaCas9) or 1B (for SluCas9) for exon: 35. In some embodiments, a composition is provided comprising a pair of guide RNAs, or nucleic acid encoding a pair of guide RNAs, wherein the pair of guide RNAs comprises or consists of any two of the guide sequences of Tables 1A (for SaCas9) or 1B (for SluCas9) for exon: 36. In some embodiments, a composition is provided comprising a pair of guide RNAs, or nucleic acid encoding a pair of guide RNAs, wherein the pair of guide RNAs comprises or consists of any two of the guide sequences of Tables 1A (for SaCas9) or 1B (for SluCas9) for exon: 37. In some embodiments, a composition is provided comprising a pair of guide RNAs, or nucleic acid encoding a pair of guide RNAs, wherein the pair of guide RNAs comprises or consists of any two of the guide sequences of Tables 1A (for SaCas9) or 1B (for SluCas9) for exon: 38. In some embodiments, a composition is provided comprising a pair of guide RNAs, or nucleic acid encoding a pair of guide RNAs, wherein the pair of guide RNAs comprises or consists of any two of the guide sequences of Tables 1A (for SaCas9) or 1B (for SluCas9) for exon: 39. In some embodiments, a composition is provided comprising a pair of guide RNAs, or nucleic acid encoding a pair of guide RNAs, wherein the pair of guide RNAs comprises or consists of any two of the guide sequences of Tables 1A (for SaCas9) or 1B (for SluCas9) for exon: 40. In some embodiments, a composition is provided comprising a pair of guide RNAs, or nucleic acid encoding a pair of guide RNAs, wherein the pair of guide RNAs comprises or consists of any two of the guide sequences of Tables 1A (for SaCas9) or 1B (for SluCas9) for exon: 41. In some embodiments, a composition is provided comprising a pair of guide RNAs, or nucleic acid encoding a pair of guide RNAs, wherein the pair of guide RNAs comprises or consists of any two of the guide sequences of Tables 1A (for SaCas9) or 1B (for SluCas9) for exon: 42. In some embodiments, a composition is provided comprising a pair of guide RNAs, or nucleic acid encoding a pair of guide RNAs, wherein the pair of guide RNAs comprises or consists of any two of the guide sequences of Tables 1A (for SaCas9) or 1B (for SluCas9) for exon: 43. In some embodiments, a composition is provided comprising a pair of guide RNAs, or nucleic acid encoding a pair of guide RNAs, wherein the pair of guide RNAs comprises or consists of any two of the guide sequences of Tables 1A (for SaCas9) or 1B (for SluCas9) for exon: 46. In some embodiments, a composition is provided comprising a pair of guide RNAs, or nucleic acid encoding a pair of guide RNAs, wherein the pair of guide RNAs comprises or consists of any two of the guide sequences of Tables 1A (for SaCas9) or 1B (for SluCas9) for exon: 47. In some embodiments, a composition is provided comprising a pair of guide RNAs, or nucleic acid encoding a pair of guide RNAs, wherein the pair of guide RNAs comprises or consists of any two of the guide sequences of Tables 1A (for SaCas9) or 1B (for SluCas9) for exon: 48. In some embodiments, a composition is provided comprising a pair of guide RNAs, or nucleic acid encoding a pair of guide RNAs, wherein the pair of guide RNAs comprises or consists of any two of the guide sequences of Tables 1A (for SaCas9) or 1B (for SluCas9) for exon: 49. In some embodiments, a composition is provided comprising a pair of guide RNAs, or nucleic acid encoding a pair of guide RNAs, wherein the pair of guide RNAs comprises or consists of any two of the guide sequences of Tables 1A (for SaCas9) or 1B (for SluCas9) for exon: 52. In some embodiments, a composition is provided comprising a pair of guide RNAs, or nucleic acid encoding a pair of guide RNAs, wherein the pair of guide RNAs comprises or consists of any two of the guide sequences of Tables 1A (for SaCas9) or 1B (for SluCas9) for exon: 54. In some embodiments, a composition is provided comprising a pair of guide RNAs, or nucleic acid encoding a pair of guide RNAs, wherein the pair of guide RNAs comprises or consists of any two of the guide sequences of Tables 1A (for SaCas9) or 1B (for SluCas9) for exon: 55. In some embodiments, a composition is provided comprising a pair of guide RNAs, or nucleic acid encoding a pair of guide RNAs, wherein the pair of guide RNAs comprises or consists of any two of the guide sequences of Tables 1A (for SaCas9) or 1B (for SluCas9) for exon: 56. In some embodiments, a composition is provided comprising a pair of guide RNAs, or nucleic acid encoding a pair of guide RNAs, wherein the pair of guide RNAs comprises or consists of any two of the guide sequences of Tables 1A (for SaCas9) or 1B (for SluCas9) for exon: 57. In some embodiments, a composition is provided comprising a pair of guide RNAs, or nucleic acid encoding a pair of guide RNAs, wherein the pair of guide RNAs comprises or consists of any two of the guide sequences of Tables 1A (for SaCas9) or 1B (for SluCas9) for exon: 58. In some embodiments, a composition is provided comprising a pair of guide RNAs, or nucleic acid encoding a pair of guide RNAs, wherein the pair of guide RNAs comprises or consists of any two of the guide sequences of Tables 1A (for SaCas9) or 1B (for SluCas9) for exon: 59. In some embodiments, a composition is provided comprising a pair of guide RNAs, or nucleic acid encoding a pair of guide RNAs, wherein the pair of guide RNAs comprises or consists of any two of the guide sequences of Tables 1A (for SaCas9) or 1B (for SluCas9) for exon: 60. In some embodiments, a composition is provided comprising a pair of guide RNAs, or nucleic acid encoding a pair of guide RNAs, wherein the pair of guide RNAs comprises or consists of any two of the guide sequences of Tables 1A (for SaCas9) or 1B (for SluCas9) for exon: 61. In some embodiments, a composition is provided comprising a pair of guide RNAs, or nucleic acid encoding a pair of guide RNAs, wherein the pair of guide RNAs comprises or consists of any two of the guide sequences of Tables 1A (for SaCas9) or 1B (for SluCas9) for exon: 62. In some embodiments, a composition is provided comprising a pair of guide RNAs, or nucleic acid encoding a pair of guide RNAs, wherein the pair of guide RNAs comprises or consists of any two of the guide sequences of Tables 1A (for SaCas9) or 1B (for SluCas9) for exon: 63. In some embodiments, a composition is provided comprising a pair of guide RNAs, or nucleic acid encoding a pair of guide RNAs, wherein the pair of guide RNAs comprises or consists of any two of the guide sequences of Tables 1A (for SaCas9) or 1B (for SluCas9) for exon: 64. In some embodiments, a composition is provided comprising a pair of guide RNAs, or nucleic acid encoding a pair of guide RNAs, wherein the pair of guide RNAs comprises or consists of any two of the guide sequences of Tables 1A (for SaCas9) or 1B (for SluCas9) for exon: 65. In some embodiments, a composition is provided comprising a pair of guide RNAs, or nucleic acid encoding a pair of guide RNAs, wherein the pair of guide RNAs comprises or consists of any two of the guide sequences of Tables 1A (for SaCas9) or 1B (for SluCas9) for exon: 66. In some embodiments, a composition is provided comprising a pair of guide RNAs, or nucleic acid encoding a pair of guide RNAs, wherein the pair of guide RNAs comprises or consists of any two of the guide sequences of Tables 1A (for SaCas9) or 1B (for SluCas9) for exon: 67. In some embodiments, a composition is provided comprising a pair of guide RNAs, or nucleic acid encoding a pair of guide RNAs, wherein the pair of guide RNAs comprises or consists of any two of the guide sequences of Tables 1A (for SaCas9) or 1B (for SluCas9) for exon: 68. In some embodiments, a composition is provided comprising a pair of guide RNAs, or nucleic acid encoding a pair of guide RNAs, wherein the pair of guide RNAs comprises or consists of any two of the guide sequences of Tables 1A (for SaCas9) or 1B (for SluCas9) for exon: 69. In some embodiments, a composition is provided comprising a pair of guide RNAs, or nucleic acid encoding a pair of guide RNAs, wherein the pair of guide RNAs comprises or consists of any two of the guide sequences of Tables 1A (for SaCas9) or 1B (for SluCas9) for exon: 70. In some embodiments, a composition is provided comprising a pair of guide RNAs, or nucleic acid encoding a pair of guide RNAs, wherein the pair of guide RNAs comprises or consists of any two of the guide sequences of Tables 1A (for SaCas9) or 1B (for SluCas9) for exon: 71. In some embodiments, a composition is provided comprising a pair of guide RNAs, or nucleic acid encoding a pair of guide RNAs, wherein the pair of guide RNAs comprises or consists of any two of the guide sequences of Tables 1A (for SaCas9) or 1B (for SluCas9) for exon: 72. In some embodiments, a composition is provided comprising a pair of guide RNAs, or nucleic acid encoding a pair of guide RNAs, wherein the pair of guide RNAs comprises or consists of any two of the guide sequences of Tables 1A (for SaCas9) or 1B (for SluCas9) for exon: 73. In some embodiments, a composition is provided comprising a pair of guide RNAs, or nucleic acid encoding a pair of guide RNAs, wherein the pair of guide RNAs comprises or consists of any two of the guide sequences of Tables 1A (for SaCas9) or 1B (for SluCas9) for exon: 74. In some embodiments, a composition is provided comprising a pair of guide RNAs, or nucleic acid encoding a pair of guide RNAs, wherein the pair of guide RNAs comprises or consists of any two of the guide sequences of Tables 1A (for SaCas9) or 1B (for SluCas9) for exon: 75. In some embodiments, a composition is provided comprising a pair of guide RNAs, or nucleic acid encoding a pair of guide RNAs, wherein the pair of guide RNAs comprises or consists of any two of the guide sequences of Tables 1A (for SaCas9) or 1B (for SluCas9) for exon: 76. In some embodiments, a composition is provided comprising a pair of guide RNAs, or nucleic acid encoding a pair of guide RNAs, wherein the pair of guide RNAs comprises or consists of any two of the guide sequences of Tables 1A (for SaCas9) or 1B (for SluCas9) for exon: 77. In some embodiments, a composition is provided comprising a pair of guide RNAs, or nucleic acid encoding a pair of guide RNAs, wherein the pair of guide RNAs comprises or consists of any two of the guide sequences of Tables 1A (for SaCas9) or 1B (for SluCas9) for exon: 78. In some embodiments, a composition is provided comprising a pair of guide RNAs, or nucleic acid encoding a pair of guide RNAs, wherein the pair of guide RNAs comprises or consists of any two of the guide sequences of Tables 1A (for SaCas9) or 1B (for SluCas9) for exon: 79. For clarity, a guide sequence of Tables 1A or 1B is “for exon: XX” if the guide targets a region in the recited exon.

[0095] In some embodiments, a composition is provided comprising: i) an SaCas9 or a nucleic acid encoding a SaCas9, and ii) a first and a second guide RNA, or a nucleic acid encoding a first and a second guide RNA, wherein the first and second guide RNA comprise any two spacer sequences of SEQ ID NOs: 1000-1353. In particular embodiments, the first and second guide RNAs each comprise sequences that target the same exon. In particular embodiments, the first and second guide RNAs each comprise sequences that target a different site in the same exon.

[0096] In some embodiments, a composition is provided comprising: i) an SluCas9 or a nucleic acid encoding a SluCas9, and ii) a first and a second guide RNA, or a nucleic acid encoding a first and a second guide RNA, wherein the first and second guide RNA comprises any two spacer sequences of SEQ ID NOs: 4000-5226. In particular embodiments, the first and second guide RNAs each comprise sequences that target the same exon. In particular embodiments, the first and second guide RNAs each comprise sequences that target a different site in the same exon.

[0097] In some embodiments, a composition is provided comprising: i) an SaCas9-KKH or a nucleic acid encoding a SaCas9-KKH, and ii) a first and a second guide RNA, or a nucleic acid encoding a first and a second guide RNA, wherein the first and second guide RNA comprises any two spacer sequences of SEQ ID NOs 1354-3081. In particular embodiments, the first and second guide RNAs each comprise sequences that target the same exon. In particular embodiments, the first and second guide RNAs each comprise sequences that target a different site in the same exon. In some embodiments, the composition further comprises an endonuclease or a nucleic acid encoding an endonuclease. An exemplary endonuclease for use with each of the guide RNAs or pairs of guide RNAs is provided herein, for example, in Tables 1A-B, at column “enzyme,” or in the “Guide ID” name as “Sa” for SaCas9, “SaCas9KKH” for SaCas9, or “SL” for SluCas9.

[0098] In some embodiments, a composition is provided comprising a single nucleic acid molecule comprising a nucleic acid encoding any of the guide RNAs disclosed herein, or any of the pairs of guide RNAs disclosed herein, and optionally a nucleic acid encoding an endonuclease.

[0099] In some embodiments, a composition is provided comprising at least two nucleic acid molecules comprising a nucleic acid encoding any of the guide RNAs disclosed herein, or any of the pairs of guide RNAs disclosed herein, and optionally a nucleic acid encoding an endonuclease, wherein at least one nucleic acid molecule does not comprise a nucleic acid encoding an endonuclease.

[0100] In some embodiments, a composition is provided comprising or consisting of a single nucleic acid molecule comprising: i) a nucleic acid encoding Staphylococcus aureus Cas9 (SaCas9) or Staphylococcus lugdunensis (SluCas9) and at least one, at least two, or at least three guide RNAs; or ii) a nucleic acid encoding Staphylococcus aureus Cas9 (SaCas9) or Staphylococcus lugdunensis (SluCas9) and from one to n guide RNAs, wherein n is no more than the maximum number of guide RNAs that can be expressed from said nucleic acid; or iii) a nucleic acid encoding Staphylococcus aureus Cas9 (SaCas9) or Staphylococcus lugdunensis (SluCas9) and one to three guide RNAs, wherein in each instance, the single nucleic acid molecule comprises a nucleic acid encoding at least one, at least two, or two guide sequence(s) of Table 1A or Table 1B.

[0101] In some embodiments, a composition is provided comprising or consisting of at least two nucleic acid molecules comprising a first nucleic acid encoding Staphylococcus aureus Cas9 (SaCas9) or Staphylococcus lugdunensis (SluCas9) and i) a nucleic acid encoding at least one, at least two, or at least three guide RNAs; or ii) a nucleic acid encoding from one to n guide RNAs, wherein n is no more than the maximum number of guide RNAs that can be expressed from said nucleic acid; or iii) a nucleic acid encoding one to three guide RNAs; and a second nucleic acid that does not encode a SaCas9 or SluCas9, optionally wherein the second nucleic acid comprises any one of i) at least one, at least two, at least three, at least four, at least five, or at least six guide RNAs; or ii) from one to n guide RNAs, wherein n is no more than the maximum number of guide RNAs that can be expressed from said nucleic acid; or iii) from one to six guide RNAs, wherein in each instance, the guide RNAs comprises nucleic acid encoding at least one, at least two, or two guide sequence of Table 1A or Table 1B. The disclosure herein may reference a “first and a second spacer” or a “first and a second guide RNA, gRNA, or sgRNA” followed by one or more pairs of specific sequences. It should be noted that the order of the sequences in the pair is not intended to be restricted to the order in which they are presented/described. For example, the phrase “the first sgRNA and the second sgRNA comprise the sequences of SEQ ID NOs: 1000 and 1015” could mean that the first sgRNA comprises the sequence of SEQ ID NO: 1000 and the second sgRNA sequence comprises the sequence of SEQ ID NO: 1015, or this phrase could mean that the first sgRNA comprises the sequence of SEQ ID NO: 1015 and the second sgRNA sequence comprises the sequence of SEQ ID NO: 1000.

[0102] In some embodiments, the first and/or the second nucleic acid, if present, comprises at least two guide RNAs. In some embodiments, the first and/or the second nucleic acid, if present, comprises at least three guide RNAs. In some embodiments, the first and/or the second nucleic acid, if present, comprises at least four guide RNAs. In some embodiments, the first and/or the second nucleic acid, if present, comprises at least five guide RNAs. In some embodiments, the first and/or the second nucleic acid, if present, comprises at least six guide RNAs. In some embodiments, the first nucleic acid encodes an endonuclease and at least one, at least two, or at least three guide RNAs. In some embodiments, the first nucleic acid comprises an endonuclease and from one to n guide RNAs, wherein n is no more than the maximum number of guide RNAs that can be expressed from said nucleic acid. In some embodiments, the first nucleic acid encodes an endonuclease and from one to three guide RNAs. In some embodiments, the first nucleic acid comprises 1, 2, 3, 4, 5, or 6 guide RNAs, but does not encode an endonuclease.

[0103] In some embodiments, the second nucleic acid, if present, encodes at least one, at least two, at least three, at least four, at least five, or at least six guide RNAs. In some embodiments, the second nucleic acid, if present, encodes from one to n guide RNAs, wherein n is no more than the maximum number of guide RNAs that can be expressed from said nucleic acid In some embodiments, the second nucleic acid, if present, encodes from one to six guide RNAs. In some embodiments, the second nucleic acid, if present, encodes 2-10, 2-9, 2-8, 2-7, 2-6, 2-5, 2-4, or 2-3 guide RNAs. In some embodiments, the second nucleic acid, if present, encodes 2, 3, 4, 5, or 6 guide RNAs. In some embodiments, the second nucleic acid comprises 1, 2, 3, 4, 5, or 6 guide RNAs, but does not encode an endonuclease.

[0104] In some embodiments, the disclosure provides for a composition comprising at least two nucleic acid molecules, wherein the first nucleic acid comprises a guide RNA and the second nucleic acid comprises a guide RNA, wherein the guide RNA encoded by the first nucleic acid and the second nucleic acid are the same. In some embodiments, the disclosure provides for a composition comprising at least two nucleic acid molecules, wherein the first nucleic acid comprises a guide RNA and the second nucleic acid comprises a guide RNA, wherein the guide RNA encoded by the first nucleic acid and the second nucleic acid are different. In some embodiments, the disclosure provides for a composition comprising at least two nucleic acid molecules, wherein the first nucleic acid comprises a guide RNA and the second nucleic acid comprises a guide RNA, wherein at least one guide RNA binds to a target sequence within an exon in the DMD gene that is upstream of a premature stop codon, and wherein at least one guide RNA binds to a target sequence within an exon in the DMD gene that is downstream of a premature stop codon. In some embodiments, the disclosure provides for a composition comprising at least two nucleic acid molecules, wherein the first nucleic acid comprises a guide RNA and the second nucleic acid comprises a guide RNA, wherein the same guide RNA is encoded by the nucleic acid of the first and second nucleic acid molecule. In some embodiments, the disclosure provides for a composition comprising at least two nucleic acid molecules, wherein the first nucleic acid comprises a guide RNA and the second nucleic acid comprises a guide RNA, wherein the second nucleic acid molecule encodes a guide RNA that binds to the same target sequence as the guide RNA in the first nucleic acid molecule. In some embodiments, the disclosure provides for a composition comprising at least two nucleic acid molecules, wherein the second nucleic acid molecule encodes at least 2, at least 3, at least 4, at least 5, or at least 6 guide RNAs, wherein the guide RNAs in the second nucleic acid molecule bind to the same target sequence as the guide RNA in the first nucleic acid molecule.

[0105] In some embodiments, the disclosure provides for a composition comprising at least two guide RNAs, i) each guide RNA targets the same genomic target sequence; ii) each guide RNA targets a different target sequence; or iii) at least one guide RNA targets one sequence and at least one guide RNA targets a different sequence.

[0106] In some embodiments, the disclosure provides for a composition comprising a guide RNA that binds to an exon of the DMD gene, wherein the exon is selected from exon 1, 2, 3, 4, 5, 6, 7, 8, 9, 10, 11, 12, 13, 14, 15, 16, 17, 18, 19, 20, 21, 22, 23, 24, 25, 26, 27, 28, 29, 30, 31, 32, 33, 34, 35, 36, 37, 38, 39, 40, 41, 42, 43, 46, 47, 48, 49, 52, 54, 55, 56, 57, 58, 59, 60, 61, 62, 63, 64, 65, 66, 67, 68, 69, 70, 71, 72, 73, 74, 75, 76, 77, 78, and 79.

[0107] In some embodiments, the disclosure provides for a composition comprising at least two guide RNAs that bind to an exon of the DMD gene, wherein at least one guide RNA binds to a target sequence within an exon in the DMD gene, and wherein at least one guide RNA binds to a different target sequence within the same exon in the DMD gene.

[0108] In some embodiments, the disclosure provides for a composition comprising at least two guide RNAs, wherein at least one guide RNA binds to a target sequence within an exon that is upstream of a premature stop codon, and wherein at least one guide RNA binds to a target sequence within an exon that is downstream of a premature stop codon.

[0109] In some embodiments, the disclosure provides for a composition comprising at least two guide RNAs, wherein at least one guide RNA binds to a target sequence within an exon in the DMD gene, and wherein at least one guide RNA binds to a different target sequence within the same exon in the DMD gene, wherein when expressed in vitro or in vivo in the presence of an appropriate endonuclease (e.g., SaCas9 or SluCas9), a portion of the exon is excised. In some embodiments, the disclosure provides for a composition comprising at least two guide RNAs, wherein once expressed in vitro or in vivo in the presence of an appropriate endonuclease (e.g., SaCas9 or SluCas9), the endonuclease excises a portion of the exon.

[0110] In some embodiments, the disclosure provides for a composition comprising at least two guide RNAs, wherein once expressed in vitro or in vivo in the presence of an appropriate endonuclease (e.g., SaCas9 or SluCas9), the endonuclease excises a portion of the exon, and wherein the portion of the exon remaining after excision are rejoined with a one nucleotide insertion. In some embodiments, the disclosure provides for a composition comprising at least two guide RNAs, wherein once expressed in vitro or in vivo in the presence of an appropriate endonuclease (e.g., SaCas9 or SluCas9), the endonuclease excises a portion of the exon, wherein the portion of the exon remaining after excision is rejoined without a nucleotide insertion.

[0111] In some embodiments, the disclosure provides for a composition comprising at least two guide RNAs, wherein once expressed in vitro or in vivo in the presence of an appropriate endonuclease (e.g., SaCas9 or SluCas9), the endonuclease excises a portion of a dystrophin gene (e.g., an exon). In some embodiments, the portions of the exon remaining after excision are rejoined with a one nucleotide insertion. In some embodiments, the portions of the gene remaining after excision are rejoined without a nucleotide insertion or a two nucleotide insertion. In some embodiments, the portions of the exon remaining after excision are rejoined without any nucleotide insertion. s“Precise segmental deletion” or “precise deletion” means that the dual cut process takes out a specific deletion. This precise deletion can lead to exon refraining. In some embodiments, the size of the excised portion is between 5 and 250, 5 and 225, 5 and 200, 5 and 190, 5 and 180, 5 and 170, 5 and 160, 5 and 150, 5 and 125, 5 and 120, 5 and 115, 5 and 110, 5 and 100, 5 and 95, 5 and 90, 5 and 85, 5 and 80, 5 and 75, 5 and 70, 5 and 65, 5 and 60, 5 and 55, 5 and 50, 5 and 45, 5 and 40, 5 and 35, 5 and 30, 5 and 25, 5 and 20, 5 and 15, and 5-10 nucleotides. In some embodiments, the size of excised portion is between 20 and 250, 20 and 225, 20 and 200, 20 and 190, 20 and 180, 20 and 170, 20 and 160, 20 and 150, 20 and 125, 20 and 120, 20 and 115, 20 and 110, 20 and 100, 20 and 95, 20 and 90, 20 and 85, 20 and 80, 20 and 75, 20 and 70, 20 and 65, 20 and 60, 20 and 55, 20 and 50, 20 and 45, 20 and 40, 20 and 35, 20 and 30, and 20 and 25 nucleotides. In some embodiments, the size of excised portion is between 50 and 250, 50 and 225, 50 and 200, 50 and 190, 50 and 180, 50 and 170, 50 and 160, 50 and 150, 50 and 125, 50 and 120, 50 and 115, 50 and 110, and 50 and 100 nucleotides. In some embodiments, the size of excised portion of the exon is between 8 and 167 nucleotides.

[0112] In some embodiments, the disclosure provides for a composition comprising at least two guide RNAs, wherein once expressed in vitro or in vivo in the presence of an appropriate endonuclease (e.g., SaCas9 or SluCas9), the endonuclease excises a portion of the exon, wherein the size of the excised portion of the exon is between 5, 6, 7, 8, 9, 10, 15, or 20 and 250 nucleotides in length. In some embodiments, the disclosure provides for a composition comprising at least two guide RNAs, wherein once expressed in vitro or in vivo in the presence of an appropriate endonuclease (e.g., SaCas9 or SluCas9), the endonuclease excises a portion of the exon, wherein the size of excised portion of the exon is between 150 and 250, 100 and 250, 5 and 250, 5 and 200, 5 and 150, 5 and 100, 5 and 75, 5 and 50, 5 and 25, 5 and 10, 20 and 250, 20 and 200, 20 and 150, 20 and 100, 20 and 75, 20 and 50, 20 and 25, 50 and 250, 50 and 200, 50 and 150, 50 and 100, and 50 and 75 nucleotides.

[0113] In some embodiments, the disclosure provides for a composition comprising at least two guide RNAs, wherein once expressed in vitro or in vivo in the presence of an appropriate endonuclease (e.g., SaCas9 or SluCas9), the endonuclease excises a portion of the exon, wherein the size of excised portion of the exon is between 8 and 167 nucleotides.

[0114] In some embodiments, a guide RNA and a Cas9 are encoded on a single nucleic acid molecule. In some embodiments, the single nucleic acid molecule comprises a nucleic acid encoding a guide RNA and a nucleic acid encoding a SaCas9 or SluCas9. In some embodiments, two guide RNAs and a Cas9 are encoded on a single nucleic acid molecule. In some embodiments, the single nucleic acid molecule comprises a nucleic acid encoding a first guide RNA, a nucleic acid encoding a second guide RNA, and a nucleic acid encoding a SaCas9 or SluCas9. In some embodiments, the spacer sequences of the first and second guide RNAs are identical. In some embodiments, the spacer sequences of the first and second guide RNAs are not identical.

[0115] In some embodiments, a single nucleic acid molecule comprises a nucleic acid encoding a Cas9 and a nucleic acid encoding two guide RNAs, wherein the nucleic acid molecule encodes no more than two guide RNAs

[0116] In some embodiments, the single nucleic acid molecule is a single vector or comprised in a single vector. In some embodiments, the single vector expresses the two guide RNAs and Cas9. In some embodiments, a pair of guide RNAs and a Cas9 are provided on a single vector. In some embodiments, the single vector comprises a nucleic acid encoding a pair of guide RNAs and a nucleic acid encoding a SaCas9 or SluCas9. In some embodiments, two guide RNAs and a Cas9 are encoded on a single vector. In some embodiments, the single vector comprises a nucleic acid encoding a first guide RNA, a nucleic acid encoding a second guide RNA, and a nucleic acid encoding a SaCas9 or SluCas9. In some embodiments, the spacer sequences of the first and second guide RNAs are identical. In some embodiments, the spacer sequences of the first and second guide RNAs are not identical.

[0117] In some embodiments, the first nucleic acid molecule encodes for a Cas9 molecule and also encodes for one or more copies of a first guide RNA and one or more copies of a second guide RNA. In some embodiments, the first nucleic acid molecule encodes for a Cas9 molecule, but does not encode for any guide RNAs. In some embodiments, the second nucleic acid molecule encodes for one or more copies of a first guide RNA and one or more copies of a second guide RNA, wherein the second nucleic acid molecule does not encode for a Cas9 molecule.

[0118] In some embodiments, a composition is provided comprising at least one guide RNA (e.g., a pair of guide RNAs), or nucleic acid encoding at least one guide RNA (e.g., a pair of guide RNAs), wherein the guide RNA comprises or consists of i) any one or more of the following guide sequences; ii) at least 16, 17, 18, 19, or 20 contiguous nucleotides of any one or more of the following guide sequences; or iii) at least 70%, at least 75%, at least 80%, at least 85%, or at least 90% identical to a guide sequence comprising at least 16, 17, 18, 19, or 20 nucleotides of any one or more of the following guide sequences: SEQ ID NO: 1000; SEQ ID NO: 1001; SEQ ID NO: 1002; SEQ ID NO: 1003; SEQ ID NO: 1004; SEQ ID NO: 1005; SEQ ID NO: 1006; SEQ ID NO: 1007; SEQ ID NO: 1008; SEQ ID NO: 1009; SEQ ID NO: 1010; SEQ ID NO: 1011; SEQ ID NO: 1012; SEQ ID NO: 1013; SEQ ID NO: 1014; SEQ ID NO: 1015; SEQ ID NO: 1016; SEQ ID NO: 1017; SEQ ID NO: 1018; SEQ ID NO: 1019; SEQ ID NO: 1020; SEQ ID NO: 1021; SEQ ID NO: 1022; SEQ ID NO: 1023; SEQ ID NO: 1024; SEQ ID NO: 1025; SEQ ID NO: 1026; SEQ ID NO: 1027; SEQ ID NO: 1028; SEQ ID NO: 1029; SEQ ID NO: 1030; SEQ ID NO: 1031; SEQ ID NO: 1032; SEQ ID NO: 1033; SEQ ID NO: 1034; SEQ ID NO: 1035; SEQ ID NO: 1036; SEQ ID NO: 1037; SEQ ID NO: 1038; SEQ ID NO: 1039; SEQ ID NO: 1040; SEQ ID NO: 1041; SEQ ID NO: 1042; SEQ ID NO: 1043; SEQ ID NO: 1044; SEQ ID NO: 1045; SEQ ID NO: 1046; SEQ ID NO: 1047; SEQ ID NO: 1048; SEQ ID NO: 1049; SEQ ID NO: 1050; SEQ ID NO: 1051; SEQ ID NO: 1052; SEQ ID NO: 1053; SEQ ID NO: 1054; SEQ ID NO: 1055; SEQ ID NO: 1056; SEQ ID NO: 1057; SEQ ID NO: 1058; SEQ ID NO: 1059; SEQ ID NO: 1060; SEQ ID NO: 1061; SEQ ID NO: 1062; SEQ ID NO: 1063; SEQ ID NO: 1064; SEQ ID NO: 1065; SEQ ID NO: 1066; SEQ ID NO: 1067; SEQ ID NO: 1068; SEQ ID NO: 1069; SEQ ID NO: 1070; SEQ ID NO: 1071; SEQ ID NO: 1072; SEQ ID NO: 1073; SEQ ID NO: 1074; SEQ ID NO: 1075; SEQ ID NO: 1076; SEQ ID NO: 1077; SEQ ID NO: 1078; SEQ ID NO: 1079; SEQ ID NO: 1080; SEQ ID NO: 1081; SEQ ID NO: 1082; SEQ ID NO: 1083; SEQ ID NO: 1084; SEQ ID NO: 1085; SEQ ID NO: 1086; SEQ ID NO: 1087; SEQ ID NO: 1088; SEQ ID NO: 1089; SEQ ID NO: 1090; SEQ ID NO: 1091; SEQ ID NO: 1092; SEQ ID NO: 1093; SEQ ID NO: 1094; SEQ ID NO: 1095; SEQ ID NO: 1096; SEQ ID NO: 1097; SEQ ID NO: 1098; SEQ ID NO: 1099; SEQ ID NO: 1100; SEQ ID NO: 1101; SEQ ID NO: 1102; SEQ ID NO: 1103; SEQ ID NO: 1104; SEQ ID NO: 1105; SEQ ID NO: 1106; SEQ ID NO: 1107; SEQ ID NO: 1108; SEQ ID NO: 1109; SEQ ID NO: 1110; SEQ ID NO: 1111; SEQ ID NO: 1112; SEQ ID NO: 1113; SEQ ID NO: 1114; SEQ ID NO: 1115; SEQ ID NO: 1116; SEQ ID NO: 1117; SEQ ID NO: 1118; SEQ ID NO: 1119; SEQ ID NO: 1120; SEQ ID NO: 1121; SEQ ID NO: 1122; SEQ ID NO: 1123; SEQ ID NO: 1124; SEQ ID NO: 1125; SEQ ID NO: 1126; SEQ ID NO: 1127; SEQ ID NO: 1128; SEQ ID NO: 1129; SEQ ID NO: 1130; SEQ ID NO: 1131; SEQ ID NO: 1132; SEQ ID NO: 1133; SEQ ID NO: 1134; SEQ ID NO: 1135; SEQ ID NO: 1136; SEQ ID NO: 1137; SEQ ID NO: 1138; SEQ ID NO: 1139; SEQ ID NO: 1140; SEQ ID NO: 1141; SEQ ID NO: 1142; SEQ ID NO: 1143; SEQ ID NO: 1144; SEQ ID NO: 1145; SEQ ID NO: 1146; SEQ ID NO: 1147; SEQ ID NO: 1148; SEQ ID NO: 1149; SEQ ID NO: 1150; SEQ ID NO: 1151; SEQ ID NO: 1152; SEQ ID NO: 1153; SEQ ID NO: 1154; SEQ ID NO: 1155; SEQ ID NO: 1156; SEQ ID NO: 1157; SEQ ID NO: 1158; SEQ ID NO: 1159; SEQ ID NO: 1160; SEQ ID NO: 1161; SEQ ID NO: 1162; SEQ ID NO: 1163; SEQ ID NO: 1164; SEQ ID NO: 1165; SEQ ID NO: 1166; SEQ ID NO: 1167; SEQ ID NO: 1168; SEQ ID NO: 1169; SEQ ID NO: 1170; SEQ ID NO: 1171; SEQ ID NO: 1172; SEQ ID NO: 1173; SEQ ID NO: 1174; SEQ ID NO: 1175; SEQ ID NO: 1176; SEQ ID NO: 1177; SEQ ID NO: 1178; SEQ ID NO: 1179; SEQ ID NO: 1180; SEQ ID NO: 1181; SEQ ID NO: 1182; SEQ ID NO: 1183; SEQ ID NO: 1184; SEQ ID NO: 1185; SEQ ID NO: 1186; SEQ ID NO: 1187; SEQ ID NO: 1188; SEQ ID NO: 1189; SEQ ID NO: 1190; SEQ ID NO: 1191; SEQ ID NO: 1192; SEQ ID NO: 1193; SEQ ID NO: 1194; SEQ ID NO: 1195; SEQ ID NO: 1196; SEQ ID NO: 1197; SEQ ID NO: 1198; SEQ ID NO: 1199; SEQ ID NO: 1200; SEQ ID NO: 1201; SEQ ID NO: 1202; SEQ ID NO: 1203; SEQ ID NO: 1204; SEQ ID NO: 1205; SEQ ID NO: 1206; SEQ ID NO: 1207; SEQ ID NO: 1208; SEQ ID NO: 1209; SEQ ID NO: 1210; SEQ ID NO: 1211; SEQ ID NO: 1212; SEQ ID NO: 1213; SEQ ID NO: 1214; SEQ ID NO: 1215; SEQ ID NO: 1216; SEQ ID NO: 1217; SEQ ID NO: 1218; SEQ ID NO: 1219; SEQ ID NO: 1220; SEQ ID NO: 1221; SEQ ID NO: 1222; SEQ ID NO: 1223; SEQ ID NO: 1224; SEQ ID NO: 1225; SEQ ID NO: 1226; SEQ ID NO: 1227; SEQ ID NO: 1228; SEQ ID NO: 1229; SEQ ID NO: 1230; SEQ ID NO: 1231; SEQ ID NO: 1232; SEQ ID NO: 1233; SEQ ID NO: 1234; SEQ ID NO: 1235; SEQ ID NO: 1236; SEQ ID NO: 1237; SEQ ID NO: 1238; SEQ ID NO: 1239; SEQ ID NO: 1240; SEQ ID NO: 1241; SEQ ID NO: 1242; SEQ ID NO: 1243; SEQ ID NO: 1244; SEQ ID NO: 1245; SEQ ID NO: 1246; SEQ ID NO: 1247; SEQ ID NO: 1248; SEQ ID NO: 1249; SEQ ID NO: 1250; SEQ ID NO: 1251; SEQ ID NO: 1252; SEQ ID NO: 1253; SEQ ID NO: 1254; SEQ ID NO: 1255; SEQ ID NO: 1256; SEQ ID NO: 1257; SEQ ID NO: 1258; SEQ ID NO: 1259; SEQ ID NO: 1260; SEQ ID NO: 1261; SEQ ID NO: 1262; SEQ ID NO: 1263; SEQ ID NO: 1264; SEQ ID NO: 1265; SEQ ID NO: 1266; SEQ ID NO: 1267; SEQ ID NO: 1268; SEQ ID NO: 1269; SEQ ID NO: 1270; SEQ ID NO: 1271; SEQ ID NO: 1272; SEQ ID NO: 1273; SEQ ID NO: 1274; SEQ ID NO: 1275; SEQ ID NO: 1276; SEQ ID NO: 1277; SEQ ID NO: 1278; SEQ ID NO: 1279; SEQ ID NO: 1280; SEQ ID NO: 1281; SEQ ID NO: 1282; SEQ ID NO: 1283; SEQ ID NO: 1284; SEQ ID NO: 1285; SEQ ID NO: 1286; SEQ ID NO: 1287; SEQ ID NO: 1288; SEQ ID NO: 1289; SEQ ID NO: 1290; SEQ ID NO: 1291; SEQ ID NO: 1292; SEQ ID NO: 1293; SEQ ID NO: 1294; SEQ ID NO: 1295; SEQ ID NO: 1296; SEQ ID NO: 1297; SEQ ID NO: 1298; SEQ ID NO: 1299; SEQ ID NO: 1300; SEQ ID NO: 1301; SEQ ID NO: 1302; SEQ ID NO: 1303; SEQ ID NO: 1304; SEQ ID NO: 1305; SEQ ID NO: 1306; SEQ ID NO: 1307; SEQ ID NO: 1308; SEQ ID NO: 1309; SEQ ID NO: 1310; SEQ ID NO: 1311; SEQ ID NO: 1312; SEQ ID NO: 1313; SEQ ID NO: 1314; SEQ ID NO: 1315; SEQ ID NO: 1316; SEQ ID NO: 1317; SEQ ID NO: 1318; SEQ ID NO: 1319; SEQ ID NO: 1320; SEQ ID NO: 1321; SEQ ID NO: 1322; SEQ ID NO: 1323; SEQ ID NO: 1324; SEQ ID NO: 1325; SEQ ID NO: 1326; SEQ ID NO: 1327; SEQ ID NO: 1328; SEQ ID NO: 1329; SEQ ID NO: 1330; SEQ ID NO: 1331; SEQ ID NO: 1332; SEQ ID NO: 1333; SEQ ID NO: 1334; SEQ ID NO: 1335; SEQ ID NO: 1336; SEQ ID NO: 1337; SEQ ID NO: 1338; SEQ ID NO: 1339; SEQ ID NO: 1340; SEQ ID NO: 1341; SEQ ID NO: 1342; SEQ ID NO: 1343; SEQ ID NO: 1344; SEQ ID NO: 1345; SEQ ID NO: 1346; SEQ ID NO: 1347; SEQ ID NO: 1348; SEQ ID NO: 1349; SEQ ID NO: 1350; SEQ ID NO: 1351; SEQ ID NO: 1352; SEQ ID NO: 1353; SEQ ID NO: 1354; SEQ ID NO: 1355; SEQ ID NO: 1356; SEQ ID NO: 1357; SEQ ID NO: 1358; SEQ ID NO: 1359; SEQ ID NO: 1360; SEQ ID NO: 1361; SEQ ID NO: 1362; SEQ ID NO: 1363; SEQ ID NO: 1364; SEQ ID NO: 1365; SEQ ID NO: 1366; SEQ ID NO: 1367; SEQ ID NO: 1368; SEQ ID NO: 1369; SEQ ID NO: 1370; SEQ ID NO: 1371; SEQ ID NO: 1372; SEQ ID NO: 1373; SEQ ID NO: 1374; SEQ ID NO: 1375; SEQ ID NO: 1376; SEQ ID NO: 1377; SEQ ID NO: 1378; SEQ ID NO: 1379; SEQ ID NO: 1380; SEQ ID NO: 1381; SEQ ID NO: 1382; SEQ ID NO: 1383; SEQ ID NO: 1384; SEQ ID NO: 1385; SEQ ID NO: 1386; SEQ ID NO: 1387; SEQ ID NO: 1388; SEQ ID NO: 1389; SEQ ID NO: 1390; SEQ ID NO: 1391; SEQ ID NO: 1392; SEQ ID NO: 1393; SEQ ID NO: 1394; SEQ ID NO: 1395; SEQ ID NO: 1396; SEQ ID NO: 1397; SEQ ID NO: 1398; SEQ ID NO: 1399; SEQ ID NO: 1400; SEQ ID NO: 1401; SEQ ID NO: 1402; SEQ ID NO: 1403; SEQ ID NO: 1404; SEQ ID NO: 1405; SEQ ID NO: 1406; SEQ ID NO: 1407; SEQ ID NO: 1408; SEQ ID NO: 1409; SEQ ID NO: 1410; SEQ ID NO: 1411; SEQ ID NO: 1412; SEQ ID NO: 1413; SEQ ID NO: 1414; SEQ ID NO: 1415; SEQ ID NO: 1416; SEQ ID NO: 1417; SEQ ID NO: 1418; SEQ ID NO: 1419; SEQ ID NO: 1420; SEQ ID NO: 1421; SEQ ID NO: 1422; SEQ ID NO: 1423; SEQ ID NO: 1424; SEQ ID NO: 1425; SEQ ID NO: 1426; SEQ ID NO: 1427; SEQ ID NO: 1428; SEQ ID NO: 1429; SEQ ID NO: 1430; SEQ ID NO: 1431; SEQ ID NO: 1432; SEQ ID NO: 1433; SEQ ID NO: 1434; SEQ ID NO: 1435; SEQ ID NO: 1436; SEQ ID NO: 1437; SEQ ID NO: 1438; SEQ ID NO: 1439; SEQ ID NO: 1440; SEQ ID NO: 1441; SEQ ID NO: 1442; SEQ ID NO: 1443; SEQ ID NO: 1444; SEQ ID NO: 1445; SEQ ID NO: 1446; SEQ ID NO: 1447; SEQ ID NO: 1448; SEQ ID NO: 1449; SEQ ID NO: 1450; SEQ ID NO: 1451; SEQ ID NO: 1452; SEQ ID NO: 1453; SEQ ID NO: 1454; SEQ ID NO: 1455; SEQ ID NO: 1456; SEQ ID NO: 1457; SEQ ID NO: 1458; SEQ ID NO: 1459; SEQ ID NO: 1460; SEQ ID NO: 1461; SEQ ID NO: 1462; SEQ ID NO: 1463; SEQ ID NO: 1464; SEQ ID NO: 1465; SEQ ID NO: 1466; SEQ ID NO: 1467; SEQ ID NO: 1468; SEQ ID NO: 1469; SEQ ID NO: 1470; SEQ ID NO: 1471; SEQ ID NO: 1472; SEQ ID NO: 1473; SEQ ID NO: 1474; SEQ ID NO: 1475; SEQ ID NO: 1476; SEQ ID NO: 1477; SEQ ID NO: 1478; SEQ ID NO: 1479; SEQ ID NO: 1480; SEQ ID NO: 1481; SEQ ID NO: 1482; SEQ ID NO: 1483; SEQ ID NO: 1484; SEQ ID NO: 1485; SEQ ID NO: 1486; SEQ ID NO: 1487; SEQ ID NO: 1488; SEQ ID NO: 1489; SEQ ID NO: 1490; SEQ ID NO: 1491; SEQ ID NO: 1492; SEQ ID NO: 1493; SEQ ID NO: 1494; SEQ ID NO: 1495; SEQ ID NO: 1496; SEQ ID NO: 1497; SEQ ID NO: 1498; SEQ ID NO: 1499; SEQ ID NO: 1500; SEQ ID NO: 1501; SEQ ID NO: 1502; SEQ ID NO: 1503; SEQ ID NO: 1504; SEQ ID NO: 1505; SEQ ID NO: 1506; SEQ ID NO: 1507; SEQ ID NO: 1508; SEQ ID NO: 1509; SEQ ID NO: 1510; SEQ ID NO: 1511; SEQ ID NO: 1512; SEQ ID NO: 1513; SEQ ID NO: 1514; SEQ ID NO: 1515; SEQ ID NO: 1516; SEQ ID NO: 1517; SEQ ID NO: 1518; SEQ ID NO: 1519; SEQ ID NO: 1520; SEQ ID NO: 1521; SEQ ID NO: 1522; SEQ ID NO: 1523; SEQ ID NO: 1524; SEQ ID NO: 1525; SEQ ID NO: 1526; SEQ ID NO: 1527; SEQ ID NO: 1528; SEQ ID NO: 1529; SEQ ID NO: 1530; SEQ ID NO: 1531; SEQ ID NO: 1532; SEQ ID NO: 1533; SEQ ID NO: 1534; SEQ ID NO: 1535; SEQ ID NO: 1536; SEQ ID NO: 1537; SEQ ID NO: 1538; SEQ ID NO: 1539; SEQ ID NO: 1540; SEQ ID NO: 1541; SEQ ID NO: 1542; SEQ ID NO: 1543; SEQ ID NO: 1544; SEQ ID NO: 1545; SEQ ID NO: 1546; SEQ ID NO: 1547; SEQ ID NO: 1548; SEQ ID NO: 1549; SEQ ID NO: 1550; SEQ ID NO: 1551; SEQ ID NO: 1552; SEQ ID NO: 1553; SEQ ID NO: 1554; SEQ ID NO: 1555; SEQ ID NO: 1556; SEQ ID NO: 1557; SEQ ID NO: 1558; SEQ ID NO: 1559; SEQ ID NO: 1560; SEQ ID NO: 1561; SEQ ID NO: 1562; SEQ ID NO: 1563; SEQ ID NO: 1564; SEQ ID NO: 1565; SEQ ID NO: 1566; SEQ ID NO: 1567; SEQ ID NO: 1568; SEQ ID NO: 1569; SEQ ID NO: 1570; SEQ ID NO: 1571; SEQ ID NO: 1572; SEQ ID NO: 1573; SEQ ID NO: 1574; SEQ ID NO: 1575; SEQ ID NO: 1576; SEQ ID NO: 1577; SEQ ID NO: 1578; SEQ ID NO: 1579; SEQ ID NO: 1580; SEQ ID NO: 1581; SEQ ID NO: 1582; SEQ ID NO: 1583; SEQ ID NO: 1584; SEQ ID NO: 1585; SEQ ID NO: 1586; SEQ ID NO: 1587; SEQ ID NO: 1588; SEQ ID NO: 1589; SEQ ID NO: 1590; SEQ ID NO: 1591; SEQ ID NO: 1592; SEQ ID NO: 1593; SEQ ID NO: 1594; SEQ ID NO: 1595; SEQ ID NO: 1596; SEQ ID NO: 1597; SEQ ID NO: 1598; SEQ ID NO: 1599; SEQ ID NO: 1600; SEQ ID NO: 1601; SEQ ID NO: 1602; SEQ ID NO: 1603; SEQ ID NO: 1604; SEQ ID NO: 1605; SEQ ID NO: 1606; SEQ ID NO: 1607; SEQ ID NO: 1608; SEQ ID NO: 1609; SEQ ID NO: 1610; SEQ ID NO: 1611; SEQ ID NO: 1612; SEQ ID NO: 1613; SEQ ID NO: 1614; SEQ ID NO: 1615; SEQ ID NO: 1616; SEQ ID NO: 1617; SEQ ID NO: 1618; SEQ ID NO: 1619; SEQ ID NO: 1620; SEQ ID NO: 1621; SEQ ID NO: 1622; SEQ ID NO: 1623; SEQ ID NO: 1624; SEQ ID NO: 1625; SEQ ID NO: 1626; SEQ ID NO: 1627; SEQ ID NO: 1628; SEQ ID NO: 1629; SEQ ID NO: 1630; SEQ ID NO: 1631; SEQ ID NO: 1632; SEQ ID NO: 1633; SEQ ID NO: 1634; SEQ ID NO: 1635; SEQ ID NO: 1636; SEQ ID NO: 1637; SEQ ID NO: 1638; SEQ ID NO: 1639; SEQ ID NO: 1640; SEQ ID NO: 1641; SEQ ID NO: 1642; SEQ ID NO: 1643; SEQ ID NO: 1644; SEQ ID NO: 1645; SEQ ID NO: 1646; SEQ ID NO: 1647; SEQ ID NO: 1648; SEQ ID NO: 1649; SEQ ID NO: 1650; SEQ ID NO: 1651; SEQ ID NO: 1652; SEQ ID NO: 1653; SEQ ID NO: 1654; SEQ ID NO: 1655; SEQ ID NO: 1656; SEQ ID NO: 1657; SEQ ID NO: 1658; SEQ ID NO: 1659; SEQ ID NO: 1660; SEQ ID NO: 1661; SEQ ID NO: 1662; SEQ ID NO: 1663; SEQ ID NO: 1664; SEQ ID NO: 1665; SEQ ID NO: 1666; SEQ ID NO: 1667; SEQ ID NO: 1668; SEQ ID NO: 1669; SEQ ID NO: 1670; SEQ ID NO: 1671; SEQ ID NO: 1672; SEQ ID NO: 1673; SEQ ID NO: 1674; SEQ ID NO: 1675; SEQ ID NO: 1676; SEQ ID NO: 1677; SEQ ID NO: 1678; SEQ ID NO: 1679; SEQ ID NO: 1680; SEQ ID NO: 1681; SEQ ID NO: 1682; SEQ ID NO: 1683; SEQ ID NO: 1684; SEQ ID NO: 1685; SEQ ID NO: 1686; SEQ ID NO: 1687; SEQ ID NO: 1688; SEQ ID NO: 1689; SEQ ID NO: 1690; SEQ ID NO: 1691; SEQ ID NO: 1692; SEQ ID NO: 1693; SEQ ID NO: 1694; SEQ ID NO: 1695; SEQ ID NO: 1696; SEQ ID NO: 1697; SEQ ID NO: 1698; SEQ ID NO: 1699; SEQ ID NO: 1700; SEQ ID NO: 1701; SEQ ID NO: 1702; SEQ ID NO: 1703; SEQ ID NO: 1704; SEQ ID NO: 1705; SEQ ID NO: 1706; SEQ ID NO: 1707; SEQ ID NO: 1708; SEQ ID NO: 1709; SEQ ID NO: 1710; SEQ ID NO: 1711; SEQ ID NO: 1712; SEQ ID NO: 1713; SEQ ID NO: 1714; SEQ ID NO: 1715; SEQ ID NO: 1716; SEQ ID NO: 1717; SEQ ID NO: 1718; SEQ ID NO: 1719; SEQ ID NO: 1720; SEQ ID NO: 1721; SEQ ID NO: 1722; SEQ ID NO: 1723; SEQ ID NO: 1724; SEQ ID NO: 1725; SEQ ID NO: 1726; SEQ ID NO: 1727; SEQ ID NO: 1728; SEQ ID NO: 1729; SEQ ID NO: 1730; SEQ ID NO: 1731; SEQ ID NO: 1732; SEQ ID NO: 1733; SEQ ID NO: 1734; SEQ ID NO: 1735; SEQ ID NO: 1736; SEQ ID NO: 1737; SEQ ID NO: 1738; SEQ ID NO: 1739; SEQ ID NO: 1740; SEQ ID NO: 1741; SEQ ID NO: 1742; SEQ ID NO: 1743; SEQ ID NO: 1744; SEQ ID NO: 1745; SEQ ID NO: 1746; SEQ ID NO: 1747; SEQ ID NO: 1748; SEQ ID NO: 1749; SEQ ID NO: 1750; SEQ ID NO: 1751; SEQ ID NO: 1752; SEQ ID NO: 1753; SEQ ID NO: 1754; SEQ ID NO: 1755; SEQ ID NO: 1756; SEQ ID NO: 1757; SEQ ID NO: 1758; SEQ ID NO: 1759; SEQ ID NO: 1760; SEQ ID NO: 1761; SEQ ID NO: 1762; SEQ ID NO: 1763; SEQ ID NO: 1764; SEQ ID NO: 1765; SEQ ID NO: 1766; SEQ ID NO: 1767; SEQ ID NO: 1768; SEQ ID NO: 1769; SEQ ID NO: 1770; SEQ ID NO: 1771; SEQ ID NO: 1772; SEQ ID NO: 1773; SEQ ID NO: 1774; SEQ ID NO: 1775; SEQ ID NO: 1776; SEQ ID NO: 1777; SEQ ID NO: 1778; SEQ ID NO: 1779; SEQ ID NO: 1780; SEQ ID NO: 1781; SEQ ID NO: 1782; SEQ ID NO: 1783; SEQ ID NO: 1784; SEQ ID NO: 1785; SEQ ID NO: 1786; SEQ ID NO: 1787; SEQ ID NO: 1788; SEQ ID NO: 1789; SEQ ID NO: 1790; SEQ ID NO: 1791; SEQ ID NO: 1792; SEQ ID NO: 1793; SEQ ID NO: 1794; SEQ ID NO: 1795; SEQ ID NO: 1796; SEQ ID NO: 1797; SEQ ID NO: 1798; SEQ ID NO: 1799; SEQ ID NO: 1800; SEQ ID NO: 1801; SEQ ID NO: 1802; SEQ ID NO: 1803; SEQ ID NO: 1804; SEQ ID NO: 1805; SEQ ID NO: 1806; SEQ ID NO: 1807; SEQ ID NO: 1808; SEQ ID NO: 1809; SEQ ID NO: 1810; SEQ ID NO: 1811; SEQ ID NO: 1812; SEQ ID NO: 1813; SEQ ID NO: 1814; SEQ ID NO: 1815; SEQ ID NO: 1816; SEQ ID NO: 1817; SEQ ID NO: 1818; SEQ ID NO: 1819; SEQ ID NO: 1820; SEQ ID NO: 1821; SEQ ID NO: 1822; SEQ ID NO: 1823; SEQ ID NO: 1824; SEQ ID NO: 1825; SEQ ID NO: 1826; SEQ ID NO: 1827; SEQ ID NO: 1828; SEQ ID NO: 1829; SEQ ID NO: 1830; SEQ ID NO: 1831; SEQ ID NO: 1832; SEQ ID NO: 1833; SEQ ID NO: 1834; SEQ ID NO: 1835; SEQ ID NO: 1836; SEQ ID NO: 1837; SEQ ID NO: 1838; SEQ ID NO: 1839; SEQ ID NO: 1840; SEQ ID NO: 1841; SEQ ID NO: 1842; SEQ ID NO: 1843; SEQ ID NO: 1844; SEQ ID NO: 1845; SEQ ID NO: 1846; SEQ ID NO: 1847; SEQ ID NO: 1848; SEQ ID NO: 1849; SEQ ID NO: 1850; SEQ ID NO: 1851; SEQ ID NO: 1852; SEQ ID NO: 1853; SEQ ID NO: 1854; SEQ ID NO: 1855; SEQ ID NO: 1856; SEQ ID NO: 1857; SEQ ID NO: 1858; SEQ ID NO: 1859; SEQ ID NO: 1860; SEQ ID NO: 1861; SEQ ID NO: 1862; SEQ ID NO: 1863; SEQ ID NO: 1864; SEQ ID NO: 1865; SEQ ID NO: 1866; SEQ ID NO: 1867; SEQ ID NO: 1868; SEQ ID NO: 1869; SEQ ID NO: 1870; SEQ ID NO: 1871; SEQ ID NO: 1872; SEQ ID NO: 1873; SEQ ID NO: 1874; SEQ ID NO: 1875; SEQ ID NO: 1876; SEQ ID NO: 1877; SEQ ID NO: 1878; SEQ ID NO: 1879; SEQ ID NO: 1880; SEQ ID NO: 1881; SEQ ID NO: 1882; SEQ ID NO: 1883; SEQ ID NO: 1884; SEQ ID NO: 1885; SEQ ID NO: 1886; SEQ ID NO: 1887; SEQ ID NO: 1888; SEQ ID NO: 1889; SEQ ID NO: 1890; SEQ ID NO: 1891; SEQ ID NO: 1892; SEQ ID NO: 1893; SEQ ID NO: 1894; SEQ ID NO: 1895; SEQ ID NO: 1896; SEQ ID NO: 1897; SEQ ID NO: 1898; SEQ ID NO: 1899; SEQ ID NO: 1900; SEQ ID NO: 1901; SEQ ID NO: 1902; SEQ ID NO: 1903; SEQ ID NO: 1904; SEQ ID NO: 1905; SEQ ID NO: 1906; SEQ ID NO: 1907; SEQ ID NO: 1908; SEQ ID NO: 1909; SEQ ID NO: 1910; SEQ ID NO: 1911; SEQ ID NO: 1912; SEQ ID NO: 1913; SEQ ID NO: 1914; SEQ ID NO: 1915; SEQ ID NO: 1916; SEQ ID NO: 1917; SEQ ID NO: 1918; SEQ ID NO: 1919; SEQ ID NO: 1920; SEQ ID NO: 1921; SEQ ID NO: 1922; SEQ ID NO: 1923; SEQ ID NO: 1924; SEQ ID NO: 1925; SEQ ID NO: 1926; SEQ ID NO: 1927; SEQ ID NO: 1928; SEQ ID NO: 1929; SEQ ID NO: 1930; SEQ ID NO: 1931; SEQ ID NO: 1932; SEQ ID NO: 1933; SEQ ID NO: 1934; SEQ ID NO: 1935; SEQ ID NO: 1936; SEQ ID NO: 1937; SEQ ID NO: 1938; SEQ ID NO: 1939; SEQ ID NO: 1940; SEQ ID NO: 1941; SEQ ID NO: 1942; SEQ ID NO: 1943; SEQ ID NO: 1944; SEQ ID NO: 1945; SEQ ID NO: 1946; SEQ ID NO: 1947; SEQ ID NO: 1948; SEQ ID NO: 1949; SEQ ID NO: 1950; SEQ ID NO: 1951; SEQ ID NO: 1952; SEQ ID NO: 1953; SEQ ID NO: 1954; SEQ ID NO: 1955; SEQ ID NO: 1956; SEQ ID NO: 1957; SEQ ID NO: 1958; SEQ ID NO: 1959; SEQ ID NO: 1960; SEQ ID NO: 1961; SEQ ID NO: 1962; SEQ ID NO: 1963; SEQ ID NO: 1964; SEQ ID NO: 1965; SEQ ID NO: 1966; SEQ ID NO: 1967; SEQ ID NO: 1968; SEQ ID NO: 1969; SEQ ID NO: 1970; SEQ ID NO: 1971; SEQ ID NO: 1972; SEQ ID NO: 1973; SEQ ID NO: 1974; SEQ ID NO: 1975; SEQ ID NO: 1976; SEQ ID NO: 1977; SEQ ID NO: 1978; SEQ ID NO: 1979; SEQ ID NO: 1980; SEQ ID NO: 1981; SEQ ID NO: 1982; SEQ ID NO: 1983; SEQ ID NO: 1984; SEQ ID NO: 1985; SEQ ID NO: 1986; SEQ ID NO: 1987; SEQ ID NO: 1988; SEQ ID NO: 1989; SEQ ID NO: 1990; SEQ ID NO: 1991; SEQ ID NO: 1992; SEQ ID NO: 1993; SEQ ID NO: 1994; SEQ ID NO: 1995; SEQ ID NO: 1996; SEQ ID NO: 1997; SEQ ID NO: 1998; SEQ ID NO: 1999; SEQ ID NO: 2000; SEQ ID NO: 2001; SEQ ID NO: 2002; SEQ ID NO: 2003; SEQ ID NO: 2004; SEQ ID NO: 2005; SEQ ID NO: 2006; SEQ ID NO: 2007; SEQ ID NO: 2008; SEQ ID NO: 2009; SEQ ID NO: 2010; SEQ ID NO: 2011; SEQ ID NO: 2012; SEQ ID NO: 2013; SEQ ID NO: 2014; SEQ ID NO: 2015; SEQ ID NO: 2016; SEQ ID NO: 2017; SEQ ID NO: 2018; SEQ ID NO: 2019; SEQ ID NO: 2020; SEQ ID NO: 2021; SEQ ID NO: 2022; SEQ ID NO: 2023; SEQ ID NO: 2024; SEQ ID NO: 2025; SEQ ID NO: 2026; SEQ ID NO: 2027; SEQ ID NO: 2028; SEQ ID NO: 2029; SEQ ID NO: 2030; SEQ ID NO: 2031; SEQ ID NO: 2032; SEQ ID NO: 2033; SEQ ID NO: 2034; SEQ ID NO: 2035; SEQ ID NO: 2036; SEQ ID NO: 2037; SEQ ID NO: 2038; SEQ ID NO: 2039; SEQ ID NO: 2040; SEQ ID NO: 2041; SEQ ID NO: 2042; SEQ ID NO: 2043; SEQ ID NO: 2044; SEQ ID NO: 2045; SEQ ID NO: 2046; SEQ ID NO: 2047; SEQ ID NO: 2048; SEQ ID NO: 2049; SEQ ID NO: 2050; SEQ ID NO: 2051; SEQ ID NO: 2052; SEQ ID NO: 2053; SEQ ID NO: 2054; SEQ ID NO: 2055; SEQ ID NO: 2056; SEQ ID NO: 2057; SEQ ID NO: 2058; SEQ ID NO: 2059; SEQ ID NO: 2060; SEQ ID NO: 2061; SEQ ID NO: 2062; SEQ ID NO: 2063; SEQ ID NO: 2064; SEQ ID NO: 2065; SEQ ID NO: 2066; SEQ ID NO: 2067; SEQ ID NO: 2068; SEQ ID NO: 2069; SEQ ID NO: 2070; SEQ ID NO: 2071; SEQ ID NO: 2072; SEQ ID NO: 2073; SEQ ID NO: 2074; SEQ ID NO: 2075; SEQ ID NO: 2076; SEQ ID NO: 2077; SEQ ID NO: 2078; SEQ ID NO: 2079; SEQ ID NO: 2080; SEQ ID NO: 2081; SEQ ID NO: 2082; SEQ ID NO: 2083; SEQ ID NO: 2084; SEQ ID NO: 2085; SEQ ID NO: 2086; SEQ ID NO: 2087; SEQ ID NO: 2088; SEQ ID NO: 2089; SEQ ID NO: 2090; SEQ ID NO: 2091; SEQ ID NO: 2092; SEQ ID NO: 2093; SEQ ID NO: 2094; SEQ ID NO: 2095; SEQ ID NO: 2096; SEQ ID NO: 2097; SEQ ID NO: 2098; SEQ ID NO: 2099; SEQ ID NO: 2100; SEQ ID NO: 2101; SEQ ID NO: 2102; SEQ ID NO: 2103; SEQ ID NO: 2104; SEQ ID NO: 2105; SEQ ID NO: 2106; SEQ ID NO: 2107; SEQ ID NO: 2108; SEQ ID NO: 2109; SEQ ID NO: 2110; SEQ ID NO: 2111; SEQ ID NO: 2112; SEQ ID NO: 2113; SEQ ID NO: 2114; SEQ ID NO: 2115; SEQ ID NO: 2116; SEQ ID NO: 2117; SEQ ID NO: 2118; SEQ ID NO: 2119; SEQ ID NO: 2120; SEQ ID NO: 2121; SEQ ID NO: 2122; SEQ ID NO: 2123; SEQ ID NO: 2124; SEQ ID NO: 2125; SEQ ID NO: 2126; SEQ ID NO: 2127; SEQ ID NO: 2128; SEQ ID NO: 2129; SEQ ID NO: 2130; SEQ ID NO: 2131; SEQ ID NO: 2132; SEQ ID NO: 2133; SEQ ID NO: 2134; SEQ ID NO: 2135; SEQ ID NO: 2136; SEQ ID NO: 2137; SEQ ID NO: 2138; SEQ ID NO: 2139; SEQ ID NO: 2140; SEQ ID NO: 2141; SEQ ID NO: 2142; SEQ ID NO: 2143; SEQ ID NO: 2144; SEQ ID NO: 2145; SEQ ID NO: 2146; SEQ ID NO: 2147; SEQ ID NO: 2148; SEQ ID NO: 2149; SEQ ID NO: 2150; SEQ ID NO: 2151; SEQ ID NO: 2152; SEQ ID NO: 2153; SEQ ID NO: 2154; SEQ ID NO: 2155; SEQ ID NO: 2156; SEQ ID NO: 2157; SEQ ID NO: 2158; SEQ ID NO: 2159; SEQ ID NO: 2160; SEQ ID NO: 2161; SEQ ID NO: 2162; SEQ ID NO: 2163; SEQ ID NO: 2164; SEQ ID NO: 2165; SEQ ID NO: 2166; SEQ ID NO: 2167; SEQ ID NO: 2168; SEQ ID NO: 2169; SEQ ID NO: 2170; SEQ ID NO: 2171; SEQ ID NO: 2172; SEQ ID NO: 2173; SEQ ID NO: 2174; SEQ ID NO: 2175; SEQ ID NO: 2176; SEQ ID NO: 2177; SEQ ID NO: 2178; SEQ ID NO: 2179; SEQ ID NO: 2180; SEQ ID NO: 2181; SEQ ID NO: 2182; SEQ ID NO: 2183; SEQ ID NO: 2184; SEQ ID NO: 2185; SEQ ID NO: 2186; SEQ ID NO: 2187; SEQ ID NO: 2188; SEQ ID NO: 2189; SEQ ID NO: 2190; SEQ ID NO: 2191; SEQ ID NO: 2192; SEQ ID NO: 2193; SEQ ID NO: 2194; SEQ ID NO: 2195; SEQ ID NO: 2196; SEQ ID NO: 2197; SEQ ID NO: 2198; SEQ ID NO: 2199; SEQ ID NO: 2200; SEQ ID NO: 2201; SEQ ID NO: 2202; SEQ ID NO: 2203; SEQ ID NO: 2204; SEQ ID NO: 2205; SEQ ID NO: 2206; SEQ ID NO: 2207; SEQ ID NO: 2208; SEQ ID NO: 2209; SEQ ID NO: 2210; SEQ ID NO: 2211; SEQ ID NO: 2212; SEQ ID NO: 2213; SEQ ID NO: 2214; SEQ ID NO: 2215; SEQ ID NO: 2216; SEQ ID NO: 2217; SEQ ID NO: 2218; SEQ ID NO: 2219; SEQ ID NO: 2220; SEQ ID NO: 2221; SEQ ID NO: 2222; SEQ ID NO: 2223; SEQ ID NO: 2224; SEQ ID NO: 2225; SEQ ID NO: 2226; SEQ ID NO: 2227; SEQ ID NO: 2228; SEQ ID NO: 2229; SEQ ID NO: 2230; SEQ ID NO: 2231; SEQ ID NO: 2232; SEQ ID NO: 2233; SEQ ID NO: 2234; SEQ ID NO: 2235; SEQ ID NO: 2236; SEQ ID NO: 2237; SEQ ID NO: 2238; SEQ ID NO: 2239; SEQ ID NO: 2240; SEQ ID NO: 2241; SEQ ID NO: 2242; SEQ ID NO: 2243; SEQ ID NO: 2244; SEQ ID NO: 2245; SEQ ID NO: 2246; SEQ ID NO: 2247; SEQ ID NO: 2248; SEQ ID NO: 2249; SEQ ID NO: 2250; SEQ ID NO: 2251; SEQ ID NO: 2252; SEQ ID NO: 2253; SEQ ID NO: 2254; SEQ ID NO: 2255; SEQ ID NO: 2256; SEQ ID NO: 2257; SEQ ID NO: 2258; SEQ ID NO: 2259; SEQ ID NO: 2260; SEQ ID NO: 2261; SEQ ID NO: 2262; SEQ ID NO: 2263; SEQ ID NO: 2264; SEQ ID NO: 2265; SEQ ID NO: 2266; SEQ ID NO: 2267; SEQ ID NO: 2268; SEQ ID NO: 2269; SEQ ID NO: 2270; SEQ ID NO: 2271; SEQ ID NO: 2272; SEQ ID NO: 2273; SEQ ID NO: 2274; SEQ ID NO: 2275; SEQ ID NO: 2276; SEQ ID NO: 2277; SEQ ID NO: 2278; SEQ ID NO: 2279; SEQ ID NO: 2280; SEQ ID NO: 2281; SEQ ID NO: 2282; SEQ ID NO: 2283; SEQ ID NO: 2284; SEQ ID NO: 2285; SEQ ID NO: 2286; SEQ ID NO: 2287; SEQ ID NO: 2288; SEQ ID NO: 2289; SEQ ID NO: 2290; SEQ ID NO: 2291; SEQ ID NO: 2292; SEQ ID NO: 2293; SEQ ID NO: 2294; SEQ ID NO: 2295; SEQ ID NO: 2296; SEQ ID NO: 2297; SEQ ID NO: 2298; SEQ ID NO: 2299; SEQ ID NO: 2300; SEQ ID NO: 2301; SEQ ID NO: 2302; SEQ ID NO: 2303; SEQ ID NO: 2304; SEQ ID NO: 2305; SEQ ID NO: 2306; SEQ ID NO: 2307; SEQ ID NO: 2308; SEQ ID NO: 2309; SEQ ID NO: 2310; SEQ ID NO: 2311; SEQ ID NO: 2312; SEQ ID NO: 2313; SEQ ID NO: 2314; SEQ ID NO: 2315; SEQ ID NO: 2316; SEQ ID NO: 2317; SEQ ID NO: 2318; SEQ ID NO: 2319; SEQ ID NO: 2320; SEQ ID NO: 2321; SEQ ID NO: 2322; SEQ ID NO: 2323; SEQ ID NO: 2324; SEQ ID NO: 2325; SEQ ID NO: 2326; SEQ ID NO: 2327; SEQ ID NO: 2328; SEQ ID NO: 2329; SEQ ID NO: 2330; SEQ ID NO: 2331; SEQ ID NO: 2332; SEQ ID NO: 2333; SEQ ID NO: 2334; SEQ ID NO: 2335; SEQ ID NO: 2336; SEQ ID NO: 2337; SEQ ID NO: 2338; SEQ ID NO: 2339; SEQ ID NO: 2340; SEQ ID NO: 2341; SEQ ID NO: 2342; SEQ ID NO: 2343; SEQ ID NO: 2344; SEQ ID NO: 2345; SEQ ID NO: 2346; SEQ ID NO: 2347; SEQ ID NO: 2348; SEQ ID NO: 2349; SEQ ID NO: 2350; SEQ ID NO: 2351; SEQ ID NO: 2352; SEQ ID NO: 2353; SEQ ID NO: 2354; SEQ ID NO: 2355; SEQ ID NO: 2356; SEQ ID NO: 2357; SEQ ID NO: 2358; SEQ ID NO: 2359; SEQ ID NO: 2360; SEQ ID NO: 2361; SEQ ID NO: 2362; SEQ ID NO: 2363; SEQ ID NO: 2364; SEQ ID NO: 2365; SEQ ID NO: 2366; SEQ ID NO: 2367; SEQ ID NO: 2368; SEQ ID NO: 2369; SEQ ID NO: 2370; SEQ ID NO: 2371; SEQ ID NO: 2372; SEQ ID NO: 2373; SEQ ID NO: 2374; SEQ ID NO: 2375; SEQ ID NO: 2376; SEQ ID NO: 2377; SEQ ID NO: 2378; SEQ ID NO: 2379; SEQ ID NO: 2380; SEQ ID NO: 2381; SEQ ID NO: 2382; SEQ ID NO: 2383; SEQ ID NO: 2384; SEQ ID NO: 2385; SEQ ID NO: 2386; SEQ ID NO: 2387; SEQ ID NO: 2388; SEQ ID NO: 2389; SEQ ID NO: 2390; SEQ ID NO: 2391; SEQ ID NO: 2392; SEQ ID NO: 2393; SEQ ID NO: 2394; SEQ ID NO: 2395; SEQ ID NO: 2396; SEQ ID NO: 2397; SEQ ID NO: 2398; SEQ ID NO: 2399; SEQ ID NO: 2400; SEQ ID NO: 2401; SEQ ID NO: 2402; SEQ ID NO: 2403; SEQ ID NO: 2404; SEQ ID NO: 2405; SEQ ID NO: 2406; SEQ ID NO: 2407; SEQ ID NO: 2408; SEQ ID NO: 2409; SEQ ID NO: 2410; SEQ ID NO: 2411; SEQ ID NO: 2412; SEQ ID NO: 2413; SEQ ID NO: 2414; SEQ ID NO: 2415; SEQ ID NO: 2416; SEQ ID NO: 2417; SEQ ID NO: 2418; SEQ ID NO: 2419; SEQ ID NO: 2420; SEQ ID NO: 2421; SEQ ID NO: 2422; SEQ ID NO: 2423; SEQ ID NO: 2424; SEQ ID NO: 2425; SEQ ID NO: 2426; SEQ ID NO: 2427; SEQ ID NO: 2428; SEQ ID NO: 2429; SEQ ID NO: 2430; SEQ ID NO: 2431; SEQ ID NO: 2432; SEQ ID NO: 2433; SEQ ID NO: 2434; SEQ ID NO: 2435; SEQ ID NO: 2436; SEQ ID NO: 2437; SEQ ID NO: 2438; SEQ ID NO: 2439; SEQ ID NO: 2440; SEQ ID NO: 2441; SEQ ID NO: 2442; SEQ ID NO: 2443; SEQ ID NO: 2444; SEQ ID NO: 2445; SEQ ID NO: 2446; SEQ ID NO: 2447; SEQ ID NO: 2448; SEQ ID NO: 2449; SEQ ID NO: 2450; SEQ ID NO: 2451; SEQ ID NO: 2452; SEQ ID NO: 2453; SEQ ID NO: 2454; SEQ ID NO: 2455; SEQ ID NO: 2456; SEQ ID NO: 2457; SEQ ID NO: 2458; SEQ ID NO: 2459; SEQ ID NO: 2460; SEQ ID NO: 2461; SEQ ID NO: 2462; SEQ ID NO: 2463; SEQ ID NO: 2464; SEQ ID NO: 2465; SEQ ID NO: 2466; SEQ ID NO: 2467; SEQ ID NO: 2468; SEQ ID NO: 2469; SEQ ID NO: 2470; SEQ ID NO: 2471; SEQ ID NO: 2472; SEQ ID NO: 2473; SEQ ID NO: 2474; SEQ ID NO: 2475; SEQ ID NO: 2476; SEQ ID NO: 2477; SEQ ID NO: 2478; SEQ ID NO: 2479; SEQ ID NO: 2480; SEQ ID NO: 2481; SEQ ID NO: 2482; SEQ ID NO: 2483; SEQ ID NO: 2484; SEQ ID NO: 2485; SEQ ID NO: 2486; SEQ ID NO: 2487; SEQ ID NO: 2488; SEQ ID NO: 2489; SEQ ID NO: 2490; SEQ ID NO: 2491; SEQ ID NO: 2492; SEQ ID NO: 2493; SEQ ID NO: 2494; SEQ ID NO: 2495; SEQ ID NO: 2496; SEQ ID NO: 2497; SEQ ID NO: 2498; SEQ ID NO: 2499; SEQ ID NO: 2500; SEQ ID NO: 2501; SEQ ID NO: 2502; SEQ ID NO: 2503; SEQ ID NO: 2504; SEQ ID NO: 2505; SEQ ID NO: 2506; SEQ ID NO: 2507; SEQ ID NO: 2508; SEQ ID NO: 2509; SEQ ID NO: 2510; SEQ ID NO: 2511; SEQ ID NO: 2512; SEQ ID NO: 2513; SEQ ID NO: 2514; SEQ ID NO: 2515; SEQ ID NO: 2516; SEQ ID NO: 2517; SEQ ID NO: 2518; SEQ ID NO: 2519; SEQ ID NO: 2520; SEQ ID NO: 2521; SEQ ID NO: 2522; SEQ ID NO: 2523; SEQ ID NO: 2524; SEQ ID NO: 2525; SEQ ID NO: 2526; SEQ ID NO: 2527; SEQ ID NO: 2528; SEQ ID NO: 2529; SEQ ID NO: 2530; SEQ ID NO: 2531; SEQ ID NO: 2532; SEQ ID NO: 2533; SEQ ID NO: 2534; SEQ ID NO: 2535; SEQ ID NO: 2536; SEQ ID NO: 2537; SEQ ID NO: 2538; SEQ ID NO: 2539; SEQ ID NO: 2540; SEQ ID NO: 2541; SEQ ID NO: 2542; SEQ ID NO: 2543; SEQ ID NO: 2544; SEQ ID NO: 2545; SEQ ID NO: 2546; SEQ ID NO: 2547; SEQ ID NO: 2548; SEQ ID NO: 2549; SEQ ID NO: 2550; SEQ ID NO: 2551; SEQ ID NO: 2552; SEQ ID NO: 2553; SEQ ID NO: 2554; SEQ ID NO: 2555; SEQ ID NO: 2556; SEQ ID NO: 2557; SEQ ID NO: 2558; SEQ ID NO: 2559; SEQ ID NO: 2560; SEQ ID NO: 2561; SEQ ID NO: 2562; SEQ ID NO: 2563; SEQ ID NO: 2564; SEQ ID NO: 2565; SEQ ID NO: 2566; SEQ ID NO: 2567; SEQ ID NO: 2568; SEQ ID NO: 2569; SEQ ID NO: 2570; SEQ ID NO: 2571; SEQ ID NO: 2572; SEQ ID NO: 2573; SEQ ID NO: 2574; SEQ ID NO: 2575; SEQ ID NO: 2576; SEQ ID NO: 2577; SEQ ID NO: 2578; SEQ ID NO: 2579; SEQ ID NO: 2580; SEQ ID NO: 2581; SEQ ID NO: 2582; SEQ ID NO: 2583; SEQ ID NO: 2584; SEQ ID NO: 2585; SEQ ID NO: 2586; SEQ ID NO: 2587; SEQ ID NO: 2588; SEQ ID NO: 2589; SEQ ID NO: 2590; SEQ ID NO: 2591; SEQ ID NO: 2592; SEQ ID NO: 2593; SEQ ID NO: 2594; SEQ ID NO: 2595; SEQ ID NO: 2596; SEQ ID NO: 2597; SEQ ID NO: 2598; SEQ ID NO: 2599; SEQ ID NO: 2600; SEQ ID NO: 2601; SEQ ID NO: 2602; SEQ ID NO: 2603; SEQ ID NO: 2604; SEQ ID NO: 2605; SEQ ID NO: 2606; SEQ ID NO: 2607; SEQ ID NO: 2608; SEQ ID NO: 2609; SEQ ID NO: 2610; SEQ ID NO: 2611; SEQ ID NO: 2612; SEQ ID NO: 2613; SEQ ID NO: 2614; SEQ ID NO: 2615; SEQ ID NO: 2616; SEQ ID NO: 2617; SEQ ID NO: 2618; SEQ ID NO: 2619; SEQ ID NO: 2620; SEQ ID NO: 2621; SEQ ID NO: 2622; SEQ ID NO: 2623; SEQ ID NO: 2624; SEQ ID NO: 2625; SEQ ID NO: 2626; SEQ ID NO: 2627; SEQ ID NO: 2628; SEQ ID NO: 2629; SEQ ID NO: 2630; SEQ ID NO: 2631; SEQ ID NO: 2632; SEQ ID NO: 2633; SEQ ID NO: 2634; SEQ ID NO: 2635; SEQ ID NO: 2636; SEQ ID NO: 2637; SEQ ID NO: 2638; SEQ ID NO: 2639; SEQ ID NO: 2640; SEQ ID NO: 2641; SEQ ID NO: 2642; SEQ ID NO: 2643; SEQ ID NO: 2644; SEQ ID NO: 2645; SEQ ID NO: 2646; SEQ ID NO: 2647; SEQ ID NO: 2648; SEQ ID NO: 2649; SEQ ID NO: 2650; SEQ ID NO: 2651; SEQ ID NO: 2652; SEQ ID NO: 2653; SEQ ID NO: 2654; SEQ ID NO: 2655; SEQ ID NO: 2656; SEQ ID NO: 2657; SEQ ID NO: 2658; SEQ ID NO: 2659; SEQ ID NO: 2660; SEQ ID NO: 2661; SEQ ID NO: 2662; SEQ ID NO: 2663; SEQ ID NO: 2664; SEQ ID NO: 2665; SEQ ID NO: 2666; SEQ ID NO: 2667; SEQ ID NO: 2668; SEQ ID NO: 2669; SEQ ID NO: 2670; SEQ ID NO: 2671; SEQ ID NO: 2672; SEQ ID NO: 2673; SEQ ID NO: 2674; SEQ ID NO: 2675; SEQ ID NO: 2676; SEQ ID NO: 2677; SEQ ID NO: 2678; SEQ ID NO: 2679; SEQ ID NO: 2680; SEQ ID NO: 2681; SEQ ID NO: 2682; SEQ ID NO: 2683; SEQ ID NO: 2684; SEQ ID NO: 2685; SEQ ID NO: 2686; SEQ ID NO: 2687; SEQ ID NO: 2688; SEQ ID NO: 2689; SEQ ID NO: 2690; SEQ ID NO: 2691; SEQ ID NO: 2692; SEQ ID NO: 2693; SEQ ID NO: 2694; SEQ ID NO: 2695; SEQ ID NO: 2696; SEQ ID NO: 2697; SEQ ID NO: 2698; SEQ ID NO: 2699; SEQ ID NO: 2700; SEQ ID NO: 2701; SEQ ID NO: 2702; SEQ ID NO: 2703; SEQ ID NO: 2704; SEQ ID NO: 2705; SEQ ID NO: 2706; SEQ ID NO: 2707; SEQ ID NO: 2708; SEQ ID NO: 2709; SEQ ID NO: 2710; SEQ ID NO: 2711; SEQ ID NO: 2712; SEQ ID NO: 2713; SEQ ID NO: 2714; SEQ ID NO: 2715; SEQ ID NO: 2716; SEQ ID NO: 2717; SEQ ID NO: 2718; SEQ ID NO: 2719; SEQ ID NO: 2720; SEQ ID NO: 2721; SEQ ID NO: 2722; SEQ ID NO: 2723; SEQ ID NO: 2724; SEQ ID NO: 2725; SEQ ID NO: 2726; SEQ ID NO: 2727; SEQ ID NO: 2728; SEQ ID NO: 2729; SEQ ID NO: 2730; SEQ ID NO: 2731; SEQ ID NO: 2732; SEQ ID NO: 2733; SEQ ID NO: 2734; SEQ ID NO: 2735; SEQ ID NO: 2736; SEQ ID NO: 2737; SEQ ID NO: 2738; SEQ ID NO: 2739; SEQ ID NO: 2740; SEQ ID NO: 2741; SEQ ID NO: 2742; SEQ ID NO: 2743; SEQ ID NO: 2744; SEQ ID NO: 2745; SEQ ID NO: 2746; SEQ ID NO: 2747; SEQ ID NO: 2748; SEQ ID NO: 2749; SEQ ID NO: 2750; SEQ ID NO: 2751; SEQ ID NO: 2752; SEQ ID NO: 2753; SEQ ID NO: 2754; SEQ ID NO: 2755; SEQ ID NO: 2756; SEQ ID NO: 2757; SEQ ID NO: 2758; SEQ ID NO: 2759; SEQ ID NO: 2760; SEQ ID NO: 2761; SEQ ID NO: 2762; SEQ ID NO: 2763; SEQ ID NO: 2764; SEQ ID NO: 2765; SEQ ID NO: 2766; SEQ ID NO: 2767; SEQ ID NO: 2768; SEQ ID NO: 2769; SEQ ID NO: 2770; SEQ ID NO: 2771; SEQ ID NO: 2772; SEQ ID NO: 2773; SEQ ID NO: 2774; SEQ ID NO: 2775; SEQ ID NO: 2776; SEQ ID NO: 2777; SEQ ID NO: 2778; SEQ ID NO: 2779; SEQ ID NO: 2780; SEQ ID NO: 2781; SEQ ID NO: 2782; SEQ ID NO: 2783; SEQ ID NO: 2784; SEQ ID NO: 2785; SEQ ID NO: 2786; SEQ ID NO: 2787; SEQ ID NO: 2788; SEQ ID NO: 2789; SEQ ID NO: 2790; SEQ ID NO: 2791; SEQ ID NO: 2792; SEQ ID NO: 2793; SEQ ID NO: 2794; SEQ ID NO: 2795; SEQ ID NO: 2796; SEQ ID NO: 2797; SEQ ID NO: 2798; SEQ ID NO: 2799; SEQ ID NO: 2800; SEQ ID NO: 2801; SEQ ID NO: 2802; SEQ ID NO: 2803; SEQ ID NO: 2804; SEQ ID NO: 2805; SEQ ID NO: 2806; SEQ ID NO: 2807; SEQ ID NO: 2808; SEQ ID NO: 2809; SEQ ID NO: 2810; SEQ ID NO: 2811; SEQ ID NO: 2812; SEQ ID NO: 2813; SEQ ID NO: 2814; SEQ ID NO: 2815; SEQ ID NO: 2816; SEQ ID NO: 2817; SEQ ID NO: 2818; SEQ ID NO: 2819; SEQ ID NO: 2820; SEQ ID NO: 2821; SEQ ID NO: 2822; SEQ ID NO: 2823; SEQ ID NO: 2824; SEQ ID NO: 2825; SEQ ID NO: 2826; SEQ ID NO: 2827; SEQ ID NO: 2828; SEQ ID NO: 2829; SEQ ID NO: 2830; SEQ ID NO: 2831; SEQ ID NO: 2832; SEQ ID NO: 2833; SEQ ID NO: 2834; SEQ ID NO: 2835; SEQ ID NO: 2836; SEQ ID NO: 2837; SEQ ID NO: 2838; SEQ ID NO: 2839; SEQ ID NO: 2840; SEQ ID NO: 2841; SEQ ID NO: 2842; SEQ ID NO: 2843; SEQ ID NO: 2844; SEQ ID NO: 2845; SEQ ID NO: 2846; SEQ ID NO: 2847; SEQ ID NO: 2848; SEQ ID NO: 2849; SEQ ID NO: 2850; SEQ ID NO: 2851; SEQ ID NO: 2852; SEQ ID NO: 2853; SEQ ID NO: 2854; SEQ ID NO: 2855; SEQ ID NO: 2856; SEQ ID NO: 2857; SEQ ID NO: 2858; SEQ ID NO: 2859; SEQ ID NO: 2860; SEQ ID NO: 2861; SEQ ID NO: 2862; SEQ ID NO: 2863; SEQ ID NO: 2864; SEQ ID NO: 2865; SEQ ID NO: 2866; SEQ ID NO: 2867; SEQ ID NO: 2868; SEQ ID NO: 2869; SEQ ID NO: 2870; SEQ ID NO: 2871; SEQ ID NO: 2872; SEQ ID NO: 2873; SEQ ID NO: 2874; SEQ ID NO: 2875; SEQ ID NO: 2876; SEQ ID NO: 2877; SEQ ID NO: 2878; SEQ ID NO: 2879; SEQ ID NO: 2880; SEQ ID NO: 2881; SEQ ID NO: 2882; SEQ ID NO: 2883; SEQ ID NO: 2884; SEQ ID NO: 2885; SEQ ID NO: 2886; SEQ ID NO: 2887; SEQ ID NO: 2888; SEQ ID NO: 2889; SEQ ID NO: 2890; SEQ ID NO: 2891; SEQ ID NO: 2892; SEQ ID NO: 2893; SEQ ID NO: 2894; SEQ ID NO: 2895; SEQ ID NO: 2896; SEQ ID NO: 2897; SEQ ID NO: 2898; SEQ ID NO: 2899; SEQ ID NO: 2900; SEQ ID NO: 2901; SEQ ID NO: 2902; SEQ ID NO: 2903; SEQ ID NO: 2904; SEQ ID NO: 2905; SEQ ID NO: 2906; SEQ ID NO: 2907; SEQ ID NO: 2908; SEQ ID NO: 2909; SEQ ID NO: 2910; SEQ ID NO: 2911; SEQ ID NO: 2912; SEQ ID NO: 2913; SEQ ID NO: 2914; SEQ ID NO: 2915; SEQ ID NO: 2916; SEQ ID NO: 2917; SEQ ID NO: 2918; SEQ ID NO: 2919; SEQ ID NO: 2920; SEQ ID NO: 2921; SEQ ID NO: 2922; SEQ ID NO: 2923; SEQ ID NO: 2924; SEQ ID NO: 2925; SEQ ID NO: 2926; SEQ ID NO: 2927; SEQ ID NO: 2928; SEQ ID NO: 2929; SEQ ID NO: 2930; SEQ ID NO: 2931; SEQ ID NO: 2932; SEQ ID NO: 2933; SEQ ID NO: 2934; SEQ ID NO: 2935; SEQ ID NO: 2936; SEQ ID NO: 2937; SEQ ID NO: 2938; SEQ ID NO: 2939; SEQ ID NO: 2940; SEQ ID NO: 2941; SEQ ID NO: 2942; SEQ ID NO: 2943; SEQ ID NO: 2944; SEQ ID NO: 2945; SEQ ID NO: 2946; SEQ ID NO: 2947; SEQ ID NO: 2948; SEQ ID NO: 2949; SEQ ID NO: 2950; SEQ ID NO: 2951; SEQ ID NO: 2952; SEQ ID NO: 2953; SEQ ID NO: 2954; SEQ ID NO: 2955; SEQ ID NO: 2956; SEQ ID NO: 2957; SEQ ID NO: 2958; SEQ ID NO: 2959; SEQ ID NO: 2960; SEQ ID NO: 2961; SEQ ID NO: 2962; SEQ ID NO: 2963; SEQ ID NO: 2964; SEQ ID NO: 2965; SEQ ID NO: 2966; SEQ ID NO: 2967; SEQ ID NO: 2968; SEQ ID NO: 2969; SEQ ID NO: 2970; SEQ ID NO: 2971; SEQ ID NO: 2972; SEQ ID NO: 2973; SEQ ID NO: 2974; SEQ ID NO: 2975; SEQ ID NO: 2976; SEQ ID NO: 2977; SEQ ID NO: 2978; SEQ ID NO: 2979; SEQ ID NO: 2980; SEQ ID NO: 2981; SEQ ID NO: 2982; SEQ ID NO: 2983; SEQ ID NO: 2984; SEQ ID NO: 2985; SEQ ID NO: 2986; SEQ ID NO: 2987; SEQ ID NO: 2988; SEQ ID NO: 2989; SEQ ID NO: 2990; SEQ ID NO: 2991; SEQ ID NO: 2992; SEQ ID NO: 2993; SEQ ID NO: 2994; SEQ ID NO: 2995; SEQ ID NO: 2996; SEQ ID NO: 2997; SEQ ID NO: 2998; SEQ ID NO: 2999; SEQ ID NO: 3000; SEQ ID NO: 3001; SEQ ID NO: 3002; SEQ ID NO: 3003; SEQ ID NO: 3004; SEQ ID NO: 3005; SEQ ID NO: 3006; SEQ ID NO: 3007; SEQ ID NO: 3008; SEQ ID NO: 3009; SEQ ID NO: 3010; SEQ ID NO: 3011; SEQ ID NO: 3012; SEQ ID NO: 3013; SEQ ID NO: 3014; SEQ ID NO: 3015; SEQ ID NO: 3016; SEQ ID NO: 3017; SEQ ID NO: 3018; SEQ ID NO: 3019; SEQ ID NO: 3020; SEQ ID NO: 3021; SEQ ID NO: 3022; SEQ ID NO: 3023; SEQ ID NO: 3024; SEQ ID NO: 3025; SEQ ID NO: 3026; SEQ ID NO: 3027; SEQ ID NO: 3028; SEQ ID NO: 3029; SEQ ID NO: 3030; SEQ ID NO: 3031; SEQ ID NO: 3032; SEQ ID NO: 3033; SEQ ID NO: 3034; SEQ ID NO: 3035; SEQ ID NO: 3036; SEQ ID NO: 3037; SEQ ID NO: 3038; SEQ ID NO: 3039; SEQ ID NO: 3040; SEQ ID NO: 3041; SEQ ID NO: 3042; SEQ ID NO: 3043; SEQ ID NO: 3044; SEQ ID NO: 3045; SEQ ID NO: 3046; SEQ ID NO: 3047; SEQ ID NO: 3048; SEQ ID NO: 3049; SEQ ID NO: 3050; SEQ ID NO: 3051; SEQ ID NO: 3052; SEQ ID NO: 3053; SEQ ID NO: 3054; SEQ ID NO: 3055; SEQ ID NO: 3056; SEQ ID NO: 3057; SEQ ID NO: 3058; SEQ ID NO: 3059; SEQ ID NO: 3060; SEQ ID NO: 3061; SEQ ID NO: 3062; SEQ ID NO: 3063; SEQ ID NO: 3064; SEQ ID NO: 3065; SEQ ID NO: 3066; SEQ ID NO: 3067; SEQ ID NO: 3068; SEQ ID NO: 3069; SEQ ID NO: 3070; SEQ ID NO: 3071; SEQ ID NO: 3072; SEQ ID NO: 3073; SEQ ID NO: 3074; SEQ ID NO: 3075; SEQ ID NO: 3076; SEQ ID NO: 3077; SEQ ID NO: 3078; SEQ ID NO: 3079; SEQ ID NO: 3080; SEQ ID NO: 3081; SEQ ID NO: 4000; SEQ ID NO: 4001; SEQ ID NO: 4002; SEQ ID NO: 4003; SEQ ID NO: 4004; SEQ ID NO: 4005; SEQ ID NO: 4006; SEQ ID NO: 4007; SEQ ID NO: 4008; SEQ ID NO: 4009; SEQ ID NO: 4010; SEQ ID NO: 4011; SEQ ID NO: 4012; SEQ ID NO: 4013; SEQ ID NO: 4014; SEQ ID NO: 4015; SEQ ID NO: 4016; SEQ ID NO: 4017; SEQ ID NO: 4018; SEQ ID NO: 4019; SEQ ID NO: 4020; SEQ ID NO: 4021; SEQ ID NO: 4022; SEQ ID NO: 4023; SEQ ID NO: 4024; SEQ ID NO: 4025; SEQ ID NO: 4026; SEQ ID NO: 4027; SEQ ID NO: 4028; SEQ ID NO: 4029; SEQ ID NO: 4030; SEQ ID NO: 4031; SEQ ID NO: 4032; SEQ ID NO: 4033; SEQ ID NO: 4034; SEQ ID NO: 4035; SEQ ID NO: 4036; SEQ ID NO: 4037; SEQ ID NO: 4038; SEQ ID NO: 4039; SEQ ID NO: 4040; SEQ ID NO: 4041; SEQ ID NO: 4042; SEQ ID NO: 4043; SEQ ID NO: 4044; SEQ ID NO: 4045; SEQ ID NO: 4046; SEQ ID NO: 4047; SEQ ID NO: 4048; SEQ ID NO: 4049; SEQ ID NO: 4050; SEQ ID NO: 4051; SEQ ID NO: 4052; SEQ ID NO: 4053; SEQ ID NO: 4054; SEQ ID NO: 4055; SEQ ID NO: 4056; SEQ ID NO: 4057; SEQ ID NO: 4058; SEQ ID NO: 4059; SEQ ID NO: 4060; SEQ ID NO: 4061; SEQ ID NO: 4062; SEQ ID NO: 4063; SEQ ID NO: 4064; SEQ ID NO: 4065; SEQ ID NO: 4066; SEQ ID NO: 4067; SEQ ID NO: 4068; SEQ ID NO: 4069; SEQ ID NO: 4070; SEQ ID NO: 4071; SEQ ID NO: 4072; SEQ ID NO: 4073; SEQ ID NO: 4074; SEQ ID NO: 4075; SEQ ID NO: 4076; SEQ ID NO: 4077; SEQ ID NO: 4078; SEQ ID NO: 4079; SEQ ID NO: 4080; SEQ ID NO: 4081; SEQ ID NO: 4082; SEQ ID NO: 4083; SEQ ID NO: 4084; SEQ ID NO: 4085; SEQ ID NO: 4086; SEQ ID NO: 4087; SEQ ID NO: 4088; SEQ ID NO: 4089; SEQ ID NO: 4090; SEQ ID NO: 4091; SEQ ID NO: 4092; SEQ ID NO: 4093; SEQ ID NO: 4094; SEQ ID NO: 4095; SEQ ID NO: 4096; SEQ ID NO: 4097; SEQ ID NO: 4098; SEQ ID NO: 4099; SEQ ID NO: 4100; SEQ ID NO: 4101; SEQ ID NO: 4102; SEQ ID NO: 4103; SEQ ID NO: 4104; SEQ ID NO: 4105; SEQ ID NO: 4106; SEQ ID NO: 4107; SEQ ID NO: 4108; SEQ ID NO: 4109; SEQ ID NO: 4110; SEQ ID NO: 4111; SEQ ID NO: 4112; SEQ ID NO: 4113; SEQ ID NO: 4114; SEQ ID NO: 4115; SEQ ID NO: 4116; SEQ ID NO: 4117; SEQ ID NO: 4118; SEQ ID NO: 4119; SEQ ID NO: 4120; SEQ ID NO: 4121; SEQ ID NO: 4122; SEQ ID NO: 4123; SEQ ID NO: 4124; SEQ ID NO: 4125; SEQ ID NO: 4126; SEQ ID NO: 4127; SEQ ID NO: 4128; SEQ ID NO: 4129; SEQ ID NO: 4130; SEQ ID NO: 4131; SEQ ID NO: 4132; SEQ ID NO: 4133; SEQ ID NO: 4134; SEQ ID NO: 4135; SEQ ID NO: 4136; SEQ ID NO: 4137; SEQ ID NO: 4138; SEQ ID NO: 4139; SEQ ID NO: 4140; SEQ ID NO: 4141; SEQ ID NO: 4142; SEQ ID NO: 4143; SEQ ID NO: 4144; SEQ ID NO: 4145; SEQ ID NO: 4146; SEQ ID NO: 4147; SEQ ID NO: 4148; SEQ ID NO: 4149; SEQ ID NO: 4150; SEQ ID NO: 4151; SEQ ID NO: 4152; SEQ ID NO: 4153; SEQ ID NO: 4154; SEQ ID NO: 4155; SEQ ID NO: 4156; SEQ ID NO: 4157; SEQ ID NO: 4158; SEQ ID NO: 4159; SEQ ID NO: 4160; SEQ ID NO: 4161; SEQ ID NO: 4162; SEQ ID NO: 4163; SEQ ID NO: 4164; SEQ ID NO: 4165; SEQ ID NO: 4166; SEQ ID NO: 4167; SEQ ID NO: 4168; SEQ ID NO: 4169; SEQ ID NO: 4170; SEQ ID NO: 4171; SEQ ID NO: 4172; SEQ ID NO: 4173; SEQ ID NO: 4174; SEQ ID NO: 4175; SEQ ID NO: 4176; SEQ ID NO: 4177; SEQ ID NO: 4178; SEQ ID NO: 4179; SEQ ID NO: 4180; SEQ ID NO: 4181; SEQ ID NO: 4182; SEQ ID NO: 4183; SEQ ID NO: 4184; SEQ ID NO: 4185; SEQ ID NO: 4186; SEQ ID NO: 4187; SEQ ID NO: 4188; SEQ ID NO: 4189; SEQ ID NO: 4190; SEQ ID NO: 4191; SEQ ID NO: 4192; SEQ ID NO: 4193; SEQ ID NO: 4194; SEQ ID NO: 4195; SEQ ID NO: 4196; SEQ ID NO: 4197; SEQ ID NO: 4198; SEQ ID NO: 4199; SEQ ID NO: 4200; SEQ ID NO: 4201; SEQ ID NO: 4202; SEQ ID NO: 4203; SEQ ID NO: 4204; SEQ ID NO: 4205; SEQ ID NO: 4206; SEQ ID NO: 4207; SEQ ID NO: 4208; SEQ ID NO: 4209; SEQ ID NO: 4210; SEQ ID NO: 4211; SEQ ID NO: 4212; SEQ ID NO: 4213; SEQ ID NO: 4214; SEQ ID NO: 4215; SEQ ID NO: 4216; SEQ ID NO: 4217; SEQ ID NO: 4218; SEQ ID NO: 4219; SEQ ID NO: 4220; SEQ ID NO: 4221; SEQ ID NO: 4222; SEQ ID NO: 4223; SEQ ID NO: 4224; SEQ ID NO: 4225; SEQ ID NO: 4226; SEQ ID NO: 4227; SEQ ID NO: 4228; SEQ ID NO: 4229; SEQ ID NO: 4230; SEQ ID NO: 4231; SEQ ID NO: 4232; SEQ ID NO: 4233; SEQ ID NO: 4234; SEQ ID NO: 4235; SEQ ID NO: 4236; SEQ ID NO: 4237; SEQ ID NO: 4238; SEQ ID NO: 4239; SEQ ID NO: 4240; SEQ ID NO: 4241; SEQ ID NO: 4242; SEQ ID NO: 4243; SEQ ID NO: 4244; SEQ ID NO: 4245; SEQ ID NO: 4246; SEQ ID NO: 4247; SEQ ID NO: 4248; SEQ ID NO: 4249; SEQ ID NO: 4250; SEQ ID NO: 4251; SEQ ID NO: 4252; SEQ ID NO: 4253; SEQ ID NO: 4254; SEQ ID NO: 4255; SEQ ID NO: 4256; SEQ ID NO: 4257; SEQ ID NO: 4258; SEQ ID NO: 4259; SEQ ID NO: 4260; SEQ ID NO: 4261; SEQ ID NO: 4262; SEQ ID NO: 4263; SEQ ID NO: 4264; SEQ ID NO: 4265; SEQ ID NO: 4266; SEQ ID NO: 4267; SEQ ID NO: 4268; SEQ ID NO: 4269; SEQ ID NO: 4270; SEQ ID NO: 4271; SEQ ID NO: 4272; SEQ ID NO: 4273; SEQ ID NO: 4274; SEQ ID NO: 4275; SEQ ID NO: 4276; SEQ ID NO: 4277; SEQ ID NO: 4278; SEQ ID NO: 4279; SEQ ID NO: 4280; SEQ ID NO: 4281; SEQ ID NO: 4282; SEQ ID NO: 4283; SEQ ID NO: 4284; SEQ ID NO: 4285; SEQ ID NO: 4286; SEQ ID NO: 4287; SEQ ID NO: 4288; SEQ ID NO: 4289; SEQ ID NO: 4290; SEQ ID NO: 4291; SEQ ID NO: 4292; SEQ ID NO: 4293; SEQ ID NO: 4294; SEQ ID NO: 4295; SEQ ID NO: 4296; SEQ ID NO: 4297; SEQ ID NO: 4298; SEQ ID NO: 4299; SEQ ID NO: 4300; SEQ ID NO: 4301; SEQ ID NO: 4302; SEQ ID NO: 4303; SEQ ID NO: 4304; SEQ ID NO: 4305; SEQ ID NO: 4306; SEQ ID NO: 4307; SEQ ID NO: 4308; SEQ ID NO: 4309; SEQ ID NO: 4310; SEQ ID NO: 4311; SEQ ID NO: 4312; SEQ ID NO: 4313; SEQ ID NO: 4314; SEQ ID NO: 4315; SEQ ID NO: 4316; SEQ ID NO: 4317; SEQ ID NO: 4318; SEQ ID NO: 4319; SEQ ID NO: 4320; SEQ ID NO: 4321; SEQ ID NO: 4322; SEQ ID NO: 4323; SEQ ID NO: 4324; SEQ ID NO: 4325; SEQ ID NO: 4326; SEQ ID NO: 4327; SEQ ID NO: 4328; SEQ ID NO: 4329; SEQ ID NO: 4330; SEQ ID NO: 4331; SEQ ID NO: 4332; SEQ ID NO: 4333; SEQ ID NO: 4334; SEQ ID NO: 4335; SEQ ID NO: 4336; SEQ ID NO: 4337; SEQ ID NO: 4338; SEQ ID NO: 4339; SEQ ID NO: 4340; SEQ ID NO: 4341; SEQ ID NO: 4342; SEQ ID NO: 4343; SEQ ID NO: 4344; SEQ ID NO: 4345; SEQ ID NO: 4346; SEQ ID NO: 4347; SEQ ID NO: 4348; SEQ ID NO: 4349; SEQ ID NO: 4350; SEQ ID NO: 4351; SEQ ID NO: 4352; SEQ ID NO: 4353; SEQ ID NO: 4354; SEQ ID NO: 4355; SEQ ID NO: 4356; SEQ ID NO: 4357; SEQ ID NO: 4358; SEQ ID NO: 4359; SEQ ID NO: 4360; SEQ ID NO: 4361; SEQ ID NO: 4362; SEQ ID NO: 4363; SEQ ID NO: 4364; SEQ ID NO: 4365; SEQ ID NO: 4366; SEQ ID NO: 4367; SEQ ID NO: 4368; SEQ ID NO: 4369; SEQ ID NO: 4370; SEQ ID NO: 4371; SEQ ID NO: 4372; SEQ ID NO: 4373; SEQ ID NO: 4374; SEQ ID NO: 4375; SEQ ID NO: 4376; SEQ ID NO: 4377; SEQ ID NO: 4378; SEQ ID NO: 4379; SEQ ID NO: 4380; SEQ ID NO: 4381; SEQ ID NO: 4382; SEQ ID NO: 4383; SEQ ID NO: 4384; SEQ ID NO: 4385; SEQ ID NO: 4386; SEQ ID NO: 4387; SEQ ID NO: 4388; SEQ ID NO: 4389; SEQ ID NO: 4390; SEQ ID NO: 4391; SEQ ID NO: 4392; SEQ ID NO: 4393; SEQ ID NO: 4394; SEQ ID NO: 4395; SEQ ID NO: 4396; SEQ ID NO: 4397; SEQ ID NO: 4398; SEQ ID NO: 4399; SEQ ID NO: 4400; SEQ ID NO: 4401; SEQ ID NO: 4402; SEQ ID NO: 4403; SEQ ID NO: 4404; SEQ ID NO: 4405; SEQ ID NO: 4406; SEQ ID NO: 4407; SEQ ID NO: 4408; SEQ ID NO: 4409; SEQ ID NO: 4410; SEQ ID NO: 4411; SEQ ID NO: 4412; SEQ ID NO: 4413; SEQ ID NO: 4414; SEQ ID NO: 4415; SEQ ID NO: 4416; SEQ ID NO: 4417; SEQ ID NO: 4418; SEQ ID NO: 4419; SEQ ID NO: 4420; SEQ ID NO: 4421; SEQ ID NO: 4422; SEQ ID NO: 4423; SEQ ID NO: 4424; SEQ ID NO: 4425; SEQ ID NO: 4426; SEQ ID NO: 4427; SEQ ID NO: 4428; SEQ ID NO: 4429; SEQ ID NO: 4430; SEQ ID NO: 4431; SEQ ID NO: 4432; SEQ ID NO: 4433; SEQ ID NO: 4434; SEQ ID NO: 4435; SEQ ID NO: 4436; SEQ ID NO: 4437; SEQ ID NO: 4438; SEQ ID NO: 4439; SEQ ID NO: 4440; SEQ ID NO: 4441; SEQ ID NO: 4442; SEQ ID NO: 4443; SEQ ID NO: 4444; SEQ ID NO: 4445; SEQ ID NO: 4446; SEQ ID NO: 4447; SEQ ID NO: 4448; SEQ ID NO: 4449; SEQ ID NO: 4450; SEQ ID NO: 4451; SEQ ID NO: 4452; SEQ ID NO: 4453; SEQ ID NO: 4454; SEQ ID NO: 4455; SEQ ID NO: 4456; SEQ ID NO: 4457; SEQ ID NO: 4458; SEQ ID NO: 4459; SEQ ID NO: 4460; SEQ ID NO: 4461; SEQ ID NO: 4462; SEQ ID NO: 4463; SEQ ID NO: 4464; SEQ ID NO: 4465; SEQ ID NO: 4466; SEQ ID NO: 4467; SEQ ID NO: 4468; SEQ ID NO: 4469; SEQ ID NO: 4470; SEQ ID NO: 4471; SEQ ID NO: 4472; SEQ ID NO: 4473; SEQ ID NO: 4474; SEQ ID NO: 4475; SEQ ID NO: 4476; SEQ ID NO: 4477; SEQ ID NO: 4478; SEQ ID NO: 4479; SEQ ID NO: 4480; SEQ ID NO: 4481; SEQ ID NO: 4482; SEQ ID NO: 4483; SEQ ID NO: 4484; SEQ ID NO: 4485; SEQ ID NO: 4486; SEQ ID NO: 4487; SEQ ID NO: 4488; SEQ ID NO: 4489; SEQ ID NO: 4490; SEQ ID NO: 4491; SEQ ID NO: 4492; SEQ ID NO: 4493; SEQ ID NO: 4494; SEQ ID NO: 4495; SEQ ID NO: 4496; SEQ ID NO: 4497; SEQ ID NO: 4498; SEQ ID NO: 4499; SEQ ID NO: 4500; SEQ ID NO: 4501; SEQ ID NO: 4502; SEQ ID NO: 4503; SEQ ID NO: 4504; SEQ ID NO: 4505; SEQ ID NO: 4506; SEQ ID NO: 4507; SEQ ID NO: 4508; SEQ ID NO: 4509; SEQ ID NO: 4510; SEQ ID NO: 4511; SEQ ID NO: 4512; SEQ ID NO: 4513; SEQ ID NO: 4514; SEQ ID NO: 4515; SEQ ID NO: 4516; SEQ ID NO: 4517; SEQ ID NO: 4518; SEQ ID NO: 4519; SEQ ID NO: 4520; SEQ ID NO: 4521; SEQ ID NO: 4522; SEQ ID NO: 4523; SEQ ID NO: 4524; SEQ ID NO: 4525; SEQ ID NO: 4526; SEQ ID NO: 4527; SEQ ID NO: 4528; SEQ ID NO: 4529; SEQ ID NO: 4530; SEQ ID NO: 4531; SEQ ID NO: 4532; SEQ ID NO: 4533; SEQ ID NO: 4534; SEQ ID NO: 4535; SEQ ID NO: 4536; SEQ ID NO: 4537; SEQ ID NO: 4538; SEQ ID NO: 4539; SEQ ID NO: 4540; SEQ ID NO: 4541; SEQ ID NO: 4542; SEQ ID NO: 4543; SEQ ID NO: 4544; SEQ ID NO: 4545; SEQ ID NO: 4546; SEQ ID NO: 4547; SEQ ID NO: 4548; SEQ ID NO: 4549; SEQ ID NO: 4550; SEQ ID NO: 4551; SEQ ID NO: 4552; SEQ ID NO: 4553; SEQ ID NO: 4554; SEQ ID NO: 4555; SEQ ID NO: 4556; SEQ ID NO: 4557; SEQ ID NO: 4558; SEQ ID NO: 4559; SEQ ID NO: 4560; SEQ ID NO: 4561; SEQ ID NO: 4562; SEQ ID NO: 4563; SEQ ID NO: 4564; SEQ ID NO: 4565; SEQ ID NO: 4566; SEQ ID NO: 4567; SEQ ID NO: 4568; SEQ ID NO: 4569; SEQ ID NO: 4570; SEQ ID NO: 4571; SEQ ID NO: 4572; SEQ ID NO: 4573; SEQ ID NO: 4574; SEQ ID NO: 4575; SEQ ID NO: 4576; SEQ ID NO: 4577; SEQ ID NO: 4578; SEQ ID NO: 4579; SEQ ID NO: 4580; SEQ ID NO: 4581; SEQ ID NO: 4582; SEQ ID NO: 4583; SEQ ID NO: 4584; SEQ ID NO: 4585; SEQ ID NO: 4586; SEQ ID NO: 4587; SEQ ID NO: 4588; SEQ ID NO: 4589; SEQ ID NO: 4590; SEQ ID NO: 4591; SEQ ID NO: 4592; SEQ ID NO: 4593; SEQ ID NO: 4594; SEQ ID NO: 4595; SEQ ID NO: 4596; SEQ ID NO: 4597; SEQ ID NO: 4598; SEQ ID NO: 4599; SEQ ID NO: 4600; SEQ ID NO: 4601; SEQ ID NO: 4602; SEQ ID NO: 4603; SEQ ID NO: 4604; SEQ ID NO: 4605; SEQ ID NO: 4606; SEQ ID NO: 4607; SEQ ID NO: 4608; SEQ ID NO: 4609; SEQ ID NO: 4610; SEQ ID NO: 4611; SEQ ID NO: 4612; SEQ ID NO: 4613; SEQ ID NO: 4614; SEQ ID NO: 4615; SEQ ID NO: 4616; SEQ ID NO: 4617; SEQ ID NO: 4618; SEQ ID NO: 4619; SEQ ID NO: 4620; SEQ ID NO: 4621; SEQ ID NO: 4622; SEQ ID NO: 4623; SEQ ID NO: 4624; SEQ ID NO: 4625; SEQ ID NO: 4626; SEQ ID NO: 4627; SEQ ID NO: 4628; SEQ ID NO: 4629; SEQ ID NO: 4630; SEQ ID NO: 4631; SEQ ID NO: 4632; SEQ ID NO: 4633; SEQ ID NO: 4634; SEQ ID NO: 4635; SEQ ID NO: 4636; SEQ ID NO: 4637; SEQ ID NO: 4638; SEQ ID NO: 4639; SEQ ID NO: 4640; SEQ ID NO: 4641; SEQ ID NO: 4642; SEQ ID NO: 4643; SEQ ID NO: 4644; SEQ ID NO: 4645; SEQ ID NO: 4646; SEQ ID NO: 4647; SEQ ID NO: 4648; SEQ ID NO: 4649; SEQ ID NO: 4650; SEQ ID NO: 4651; SEQ ID NO: 4652; SEQ ID NO: 4653; SEQ ID NO: 4654; SEQ ID NO: 4655; SEQ ID NO: 4656; SEQ ID NO: 4657; SEQ ID NO: 4658; SEQ ID NO: 4659; SEQ ID NO: 4660; SEQ ID NO: 4661; SEQ ID NO: 4662; SEQ ID NO: 4663; SEQ ID NO: 4664; SEQ ID NO: 4665; SEQ ID NO: 4666; SEQ ID NO: 4667; SEQ ID NO: 4668; SEQ ID NO: 4669; SEQ ID NO: 4670; SEQ ID NO: 4671; SEQ ID NO: 4672; SEQ ID NO: 4673; SEQ ID NO: 4674; SEQ ID NO: 4675; SEQ ID NO: 4676; SEQ ID NO: 4677; SEQ ID NO: 4678; SEQ ID NO: 4679; SEQ ID NO: 4680; SEQ ID NO: 4681; SEQ ID NO: 4682; SEQ ID NO: 4683; SEQ ID NO: 4684; SEQ ID NO: 4685; SEQ ID NO: 4686; SEQ ID NO: 4687; SEQ ID NO: 4688; SEQ ID NO: 4689; SEQ ID NO: 4690; SEQ ID NO: 4691; SEQ ID NO: 4692; SEQ ID NO: 4693; SEQ ID NO: 4694; SEQ ID NO: 4695; SEQ ID NO: 4696; SEQ ID NO: 4697; SEQ ID NO: 4698; SEQ ID NO: 4699; SEQ ID NO: 4700; SEQ ID NO: 4701; SEQ ID NO: 4702; SEQ ID NO: 4703; SEQ ID NO: 4704; SEQ ID NO: 4705; SEQ ID NO: 4706; SEQ ID NO: 4707; SEQ ID NO: 4708; SEQ ID NO: 4709; SEQ ID NO: 4710; SEQ ID NO: 4711; SEQ ID NO: 4712; SEQ ID NO: 4713; SEQ ID NO: 4714; SEQ ID NO: 4715; SEQ ID NO: 4716; SEQ ID NO: 4717; SEQ ID NO: 4718; SEQ ID NO: 4719; SEQ ID NO: 4720; SEQ ID NO: 4721; SEQ ID NO: 4722; SEQ ID NO: 4723; SEQ ID NO: 4724; SEQ ID NO: 4725; SEQ ID NO: 4726; SEQ ID NO: 4727; SEQ ID NO: 4728; SEQ ID NO: 4729; SEQ ID NO: 4730; SEQ ID NO: 4731; SEQ ID NO: 4732; SEQ ID NO: 4733; SEQ ID NO: 4734; SEQ ID NO: 4735; SEQ ID NO: 4736; SEQ ID NO: 4737; SEQ ID NO: 4738; SEQ ID NO: 4739; SEQ ID NO: 4740; SEQ ID NO: 4741; SEQ ID NO: 4742; SEQ ID NO: 4743; SEQ ID NO: 4744; SEQ ID NO: 4745; SEQ ID NO: 4746; SEQ ID NO: 4747; SEQ ID NO: 4748; SEQ ID NO: 4749; SEQ ID NO: 4750; SEQ ID NO: 4751; SEQ ID NO: 4752; SEQ ID NO: 4753; SEQ ID NO: 4754; SEQ ID NO: 4755; SEQ ID NO: 4756; SEQ ID NO: 4757; SEQ ID NO: 4758; SEQ ID NO: 4759; SEQ ID NO: 4760; SEQ ID NO: 4761; SEQ ID NO: 4762; SEQ ID NO: 4763; SEQ ID NO: 4764; SEQ ID NO: 4765; SEQ ID NO: 4766; SEQ ID NO: 4767; SEQ ID NO: 4768; SEQ ID NO: 4769; SEQ ID NO: 4770; SEQ ID NO: 4771; SEQ ID NO: 4772; SEQ ID NO: 4773; SEQ ID NO: 4774; SEQ ID NO: 4775; SEQ ID NO: 4776; SEQ ID NO: 4777; SEQ ID NO: 4778; SEQ ID NO: 4779; SEQ ID NO: 4780; SEQ ID NO: 4781; SEQ ID NO: 4782; SEQ ID NO: 4783; SEQ ID NO: 4784; SEQ ID NO: 4785; SEQ ID NO: 4786; SEQ ID NO: 4787; SEQ ID NO: 4788; SEQ ID NO: 4789; SEQ ID NO: 4790; SEQ ID NO: 4791; SEQ ID NO: 4792; SEQ ID NO: 4793; SEQ ID NO: 4794; SEQ ID NO: 4795; SEQ ID NO: 4796; SEQ ID NO: 4797; SEQ ID NO: 4798; SEQ ID NO: 4799; SEQ ID NO: 4800; SEQ ID NO: 4801; SEQ ID NO: 4802; SEQ ID NO: 4803; SEQ ID NO: 4804; SEQ ID NO: 4805; SEQ ID NO: 4806; SEQ ID NO: 4807; SEQ ID NO: 4808; SEQ ID NO: 4809; SEQ ID NO: 4810; SEQ ID NO: 4811; SEQ ID NO: 4812; SEQ ID NO: 4813; SEQ ID NO: 4814; SEQ ID NO: 4815; SEQ ID NO: 4816; SEQ ID NO: 4817; SEQ ID NO: 4818; SEQ ID NO: 4819; SEQ ID NO: 4820; SEQ ID NO: 4821; SEQ ID NO: 4822; SEQ ID NO: 4823; SEQ ID NO: 4824; SEQ ID NO: 4825; SEQ ID NO: 4826; SEQ ID NO: 4827; SEQ ID NO: 4828; SEQ ID NO: 4829; SEQ ID NO: 4830; SEQ ID NO: 4831; SEQ ID NO: 4832; SEQ ID NO: 4833; SEQ ID NO: 4834; SEQ ID NO: 4835; SEQ ID NO: 4836; SEQ ID NO: 4837; SEQ ID NO: 4838; SEQ ID NO: 4839; SEQ ID NO: 4840; SEQ ID NO: 4841; SEQ ID NO: 4842; SEQ ID NO: 4843; SEQ ID NO: 4844; SEQ ID NO: 4845; SEQ ID NO: 4846; SEQ ID NO: 4847; SEQ ID NO: 4848; SEQ ID NO: 4849; SEQ ID NO: 4850; SEQ ID NO: 4851; SEQ ID NO: 4852; SEQ ID NO: 4853; SEQ ID NO: 4854; SEQ ID NO: 4855; SEQ ID NO: 4856; SEQ ID NO: 4857; SEQ ID NO: 4858; SEQ ID NO: 4859; SEQ ID NO: 4860; SEQ ID NO: 4861; SEQ ID NO: 4862; SEQ ID NO: 4863; SEQ ID NO: 4864; SEQ ID NO: 4865; SEQ ID NO: 4866; SEQ ID NO: 4867; SEQ ID NO: 4868; SEQ ID NO: 4869; SEQ ID NO: 4870; SEQ ID NO: 4871; SEQ ID NO: 4872; SEQ ID NO: 4873; SEQ ID NO: 4874; SEQ ID NO: 4875; SEQ ID NO: 4876; SEQ ID NO: 4877; SEQ ID NO: 4878; SEQ ID NO: 4879; SEQ ID NO: 4880; SEQ ID NO: 4881; SEQ ID NO: 4882; SEQ ID NO: 4883; SEQ ID NO: 4884; SEQ ID NO: 4885; SEQ ID NO: 4886; SEQ ID NO: 4887; SEQ ID NO: 4888; SEQ ID NO: 4889; SEQ ID NO: 4890; SEQ ID NO: 4891; SEQ ID NO: 4892; SEQ ID NO: 4893; SEQ ID NO: 4894; SEQ ID NO: 4895; SEQ ID NO: 4896; SEQ ID NO: 4897; SEQ ID NO: 4898; SEQ ID NO: 4899; SEQ ID NO: 4900; SEQ ID NO: 4901; SEQ ID NO: 4902; SEQ ID NO: 4903; SEQ ID NO: 4904; SEQ ID NO: 4905; SEQ ID NO: 4906; SEQ ID NO: 4907; SEQ ID NO: 4908; SEQ ID NO: 4909; SEQ ID NO: 4910; SEQ ID NO: 4911; SEQ ID NO: 4912; SEQ ID NO: 4913; SEQ ID NO: 4914; SEQ ID NO: 4915; SEQ ID NO: 4916; SEQ ID NO: 4917; SEQ ID NO: 4918; SEQ ID NO: 4919; SEQ ID NO: 4920; SEQ ID NO: 4921; SEQ ID NO: 4922; SEQ ID NO: 4923; SEQ ID NO: 4924; SEQ ID NO: 4925; SEQ ID NO: 4926; SEQ ID NO: 4927; SEQ ID NO: 4928; SEQ ID NO: 4929; SEQ ID NO: 4930; SEQ ID NO: 4931; SEQ ID NO: 4932; SEQ ID NO: 4933; SEQ ID NO: 4934; SEQ ID NO: 4935; SEQ ID NO: 4936; SEQ ID NO: 4937; SEQ ID NO: 4938; SEQ ID NO: 4939; SEQ ID NO: 4940; SEQ ID NO: 4941; SEQ ID NO: 4942; SEQ ID NO: 4943; SEQ ID NO: 4944; SEQ ID NO: 4945; SEQ ID NO: 4946; SEQ ID NO: 4947; SEQ ID NO: 4948; SEQ ID NO: 4949; SEQ ID NO: 4950; SEQ ID NO: 4951; SEQ ID NO: 4952; SEQ ID NO: 4953; SEQ ID NO: 4954; SEQ ID NO: 4955; SEQ ID NO: 4956; SEQ ID NO: 4957; SEQ ID NO: 4958; SEQ ID NO: 4959; SEQ ID NO: 4960; SEQ ID NO: 4961; SEQ ID NO: 4962; SEQ ID NO: 4963; SEQ ID NO: 4964; SEQ ID NO: 4965; SEQ ID NO: 4966; SEQ ID NO: 4967; SEQ ID NO: 4968; SEQ ID NO: 4969; SEQ ID NO: 4970; SEQ ID NO: 4971; SEQ ID NO: 4972; SEQ ID NO: 4973; SEQ ID NO: 4974; SEQ ID NO: 4975; SEQ ID NO: 4976; SEQ ID NO: 4977; SEQ ID NO: 4978; SEQ ID NO: 4979; SEQ ID NO: 4980; SEQ ID NO: 4981; SEQ ID NO: 4982; SEQ ID NO: 4983; SEQ ID NO: 4984; SEQ ID NO: 4985; SEQ ID NO: 4986; SEQ ID NO: 4987; SEQ ID NO: 4988; SEQ ID NO: 4989; SEQ ID NO: 4990; SEQ ID NO: 4991; SEQ ID NO: 4992; SEQ ID NO: 4993; SEQ ID NO: 4994; SEQ ID NO: 4995; SEQ ID NO: 4996; SEQ ID NO: 4997; SEQ ID NO: 4998; SEQ ID NO: 4999; SEQ ID NO: 5000; SEQ ID NO: 5001; SEQ ID NO: 5002; SEQ ID NO: 5003; SEQ ID NO: 5004; SEQ ID NO: 5005; SEQ ID NO: 5006; SEQ ID NO: 5007; SEQ ID NO: 5008; SEQ ID NO: 5009; SEQ ID NO: 5010; SEQ ID NO: 5011; SEQ ID NO: 5012; SEQ ID NO: 5013; SEQ ID NO: 5014; SEQ ID NO: 5015; SEQ ID NO: 5016; SEQ ID NO: 5017; SEQ ID NO: 5018; SEQ ID NO: 5019; SEQ ID NO: 5020; SEQ ID NO: 5021; SEQ ID NO: 5022; SEQ ID NO: 5023; SEQ ID NO: 5024; SEQ ID NO: 5025; SEQ ID NO: 5026; SEQ ID NO: 5027; SEQ ID NO: 5028; SEQ ID NO: 5029; SEQ ID NO: 5030; SEQ ID NO: 5031; SEQ ID NO: 5032; SEQ ID NO: 5033; SEQ ID NO: 5034; SEQ ID NO: 5035; SEQ ID NO: 5036; SEQ ID NO: 5037; SEQ ID NO: 5038; SEQ ID NO: 5039; SEQ ID NO: 5040; SEQ ID NO: 5041; SEQ ID NO: 5042; SEQ ID NO: 5043; SEQ ID NO: 5044; SEQ ID NO: 5045; SEQ ID NO: 5046; SEQ ID NO: 5047; SEQ ID NO: 5048; SEQ ID NO: 5049; SEQ ID NO: 5050; SEQ ID NO: 5051; SEQ ID NO: 5052; SEQ ID NO: 5053; SEQ ID NO: 5054; SEQ ID NO: 5055; SEQ ID NO: 5056; SEQ ID NO: 5057; SEQ ID NO: 5058; SEQ ID NO: 5059; SEQ ID NO: 5060; SEQ ID NO: 5061; SEQ ID NO: 5062; SEQ ID NO: 5063; SEQ ID NO: 5064; SEQ ID NO: 5065; SEQ ID NO: 5066; SEQ ID NO: 5067; SEQ ID NO: 5068; SEQ ID NO: 5069; SEQ ID NO: 5070; SEQ ID NO: 5071; SEQ ID NO: 5072; SEQ ID NO: 5073; SEQ ID NO: 5074; SEQ ID NO: 5075; SEQ ID NO: 5076; SEQ ID NO: 5077; SEQ ID NO: 5078; SEQ ID NO: 5079; SEQ ID NO: 5080; SEQ ID NO: 5081; SEQ ID NO: 5082; SEQ ID NO: 5083; SEQ ID NO: 5084; SEQ ID NO: 5085; SEQ ID NO: 5086; SEQ ID NO: 5087; SEQ ID NO: 5088; SEQ ID NO: 5089; SEQ ID NO: 5090; SEQ ID NO: 5091; SEQ ID NO: 5092; SEQ ID NO: 5093; SEQ ID NO: 5094; SEQ ID NO: 5095; SEQ ID NO: 5096; SEQ ID NO: 5097; SEQ ID NO: 5098; SEQ ID NO: 5099; SEQ ID NO: 5100; SEQ ID NO: 5101; SEQ ID NO: 5102; SEQ ID NO: 5103; SEQ ID NO: 5104; SEQ ID NO: 5105; SEQ ID NO: 5106; SEQ ID NO: 5107; SEQ ID NO: 5108; SEQ ID NO: 5109; SEQ ID NO: 5110; SEQ ID NO: 5111; SEQ ID NO: 5112; SEQ ID NO: 5113; SEQ ID NO: 5114; SEQ ID NO: 5115; SEQ ID NO: 5116; SEQ ID NO: 5117; SEQ ID NO: 5118; SEQ ID NO: 5119; SEQ ID NO: 5120; SEQ ID NO: 5121; SEQ ID NO: 5122; SEQ ID NO: 5123; SEQ ID NO: 5124; SEQ ID NO: 5125; SEQ ID NO: 5126; SEQ ID NO: 5127; SEQ ID NO: 5128; SEQ ID NO: 5129; SEQ ID NO: 5130; SEQ ID NO: 5131; SEQ ID NO: 5132; SEQ ID NO: 5133; SEQ ID NO: 5134; SEQ ID NO: 5135; SEQ ID NO: 5136; SEQ ID NO: 5137; SEQ ID NO: 5138; SEQ ID NO: 5139; SEQ ID NO: 5140; SEQ ID NO: 5141; SEQ ID NO: 5142; SEQ ID NO: 5143; SEQ ID NO: 5144; SEQ ID NO: 5145; SEQ ID NO: 5146; SEQ ID NO: 5147; SEQ ID NO: 5148; SEQ ID NO: 5149; SEQ ID NO: 5150; SEQ ID NO: 5151; SEQ ID NO: 5152; SEQ ID NO: 5153; SEQ ID NO: 5154; SEQ ID NO: 5155; SEQ ID NO: 5156; SEQ ID NO: 5157; SEQ ID NO: 5158; SEQ ID NO: 5159; SEQ ID NO: 5160; SEQ ID NO: 5161; SEQ ID NO: 5162; SEQ ID NO: 5163; SEQ ID NO: 5164; SEQ ID NO: 5165; SEQ ID NO: 5166; SEQ ID NO: 5167; SEQ ID NO: 5168; SEQ ID NO: 5169; SEQ ID NO: 5170; SEQ ID NO: 5171; SEQ ID NO: 5172; SEQ ID NO: 5173; SEQ ID NO: 5174; SEQ ID NO: 5175; SEQ ID NO: 5176; SEQ ID NO: 5177; SEQ ID NO: 5178; SEQ ID NO: 5179; SEQ ID NO: 5180; SEQ ID NO: 5181; SEQ ID NO: 5182; SEQ ID NO: 5183; SEQ ID NO: 5184; SEQ ID NO: 5185; SEQ ID NO: 5186; SEQ ID NO: 5187; SEQ ID NO: 5188; SEQ ID NO: 5189; SEQ ID NO: 5190; SEQ ID NO: 5191; SEQ ID NO: 5192; SEQ ID NO: 5193; SEQ ID NO: 5194; SEQ ID NO: 5195; SEQ ID NO: 5196; SEQ ID NO: 5197; SEQ ID NO: 5198; SEQ ID NO: 5199; SEQ ID NO: 5200; SEQ ID NO: 5201; SEQ ID NO: 5202; SEQ ID NO: 5203; SEQ ID NO: 5204; SEQ ID NO: 5205; SEQ ID NO: 5206; SEQ ID NO: 5207; SEQ ID NO: 5208; SEQ ID NO: 5209; SEQ ID NO: 5210; SEQ ID NO: 5211; SEQ ID NO: 5212; SEQ ID NO: 5213; SEQ ID NO: 5214; SEQ ID NO: 5215; SEQ ID NO: 5216; SEQ ID NO: 5217; SEQ ID NO: 5218; SEQ ID NO: 5219; SEQ ID NO: 5220; SEQ ID NO: 5221; SEQ ID NO: 5222; SEQ ID NO: 5223; SEQ ID NO: 5224; SEQ ID NO: 5225; SEQ ID NO: 5226.

[0119] In some embodiments, a composition is provided comprising: a) one or more nucleic acid molecules encoding a SaCas9 or SluCas9 and b) a pair of guide sequences comprising a first guide sequence and a second guide sequence, wherein the first and second guide sequences are selected from any two of the guide sequences of Table 1A (for SaCas9) or Table 1B (for SluCas9). In particular embodiments, the first and second guide sequences each comprise sequences that target the same exon. In particular embodiments, the first and second guide sequences each comprise sequences that target a different site in the same exon. In some embodiments, a composition is provided comprising a single nucleic acid molecule encoding, or two nucleic acid molecules where one molecule encodes, 1) one or more guide RNA that comprises a guide sequence selected from any one of SEQ ID NOs: 1000-3081; and 2) a SaCas9. In one aspect, a composition is provided comprising a single nucleic acid molecule encoding, or two nucleic acid molecules where one molecule encodes, 1) one or more guide RNA that comprises a guide sequence selected from any one of SEQ ID NOs: 4000-5226; and 2) a SluCas9. In particular embodiments, if the composition comprises one or more nucleic acid molecules encoding more than one guide RNAs, each guide RNA targets the same exon. In particular embodiments, each guide RNA targets a different site in the same exon.

[0120] In one aspect, a composition is provided comprising a single nucleic acid molecule encoding, or two nucleic acid molecules where one molecule encodes, a) one or more guide RNA that comprises a guide sequence that is at least 99%, 98%, 97%, 96%, 95%, 94%, 93%, 92%, 91%, or 90% identical to any one of SEQ ID NOs: 1000-3081 and a SaCas9; or b) one or more guide RNA that comprises a guide sequence that is at least 99%, 98%, 97%, 96%, 95%, 94%, 93%, 92%, 91%, or 90% identical to any one of SEQ ID NOs: 4000-5226; and a SluCas9. In one aspect, a composition is provided comprising a single nucleic acid molecule encoding a) one or more guide RNA that comprises a guide sequence that is at least 99%, 98%, 97%, 96%, 95%, 94%, 93%, 92%, 91%, or 90% identical to any one of 1) SEQ ID NOs: 4000-5226, and a SluCas9; or b) one or more guide RNA that comprises a guide sequence that is at least 99%, 98%, 97%, 96%, 95%, 94%, 93%, 92%, 91%, or 90% identical to any one of SEQ ID NOs: 1000-3081, and a SaCas9. In particular embodiments, if the composition comprises one or more nucleic acid molecules encoding more than one guide RNAs, each guide RNA targets the same exon. In particular embodiments, each guide RNA targets a different site in the same exon.

[0121] In another aspect, a composition is provided comprising a single nucleic acid molecule encoding, or two nucleic acid molecules where one molecule encodes, a) one or more guide RNA that comprises a guide sequence comprising at least 16, 17, 18, 19, or 20 contiguous nucleotides of a spacer sequence selected from any one of SEQ ID NOs: 1000-3081 and a SaCas9; or b) one or more guide RNA that comprises a guide sequence comprising at least 16, 17, 18, 19, or 20 contiguous nucleotides of a spacer sequence selected from any one of SEQ ID NOs: 4000-5226 and a SluCas9. In another aspect, a composition is provided comprising a single nucleic acid molecule encoding, or two nucleic acid molecules where one molecule encodes, a) one or more guide RNA that comprises a guide sequence comprising at least 16, 17, 18, 19, or 20 contiguous nucleotides of a spacer sequence selected from any one of SEQ ID NOs: 1000-3081 and a SaCas9; or b) one or more guide RNA that comprises a guide sequence comprising at least 16, 17, 18, 19, or 20 contiguous nucleotides of a spacer sequence selected from any one of SEQ ID NOs: 4000-5226 and a SluCas9. In particular embodiments, if the composition comprises one or more nucleic acid molecules encoding more than one guide RNAs, each guide RNA targets the same exon. In particular embodiments, each guide RNA targets a different site in the same exon.

[0122] In some embodiments, any of the guides disclosed herein may be used as a research tool, e.g., to study trafficking, expression, and processing by cells.

### Scaffold Sequences

[0123] Each of the guide sequences shown in Table 1A and Table 1B may further comprise additional nucleotides to form or encode a crRNA, e.g., using any known sequence appropriate for the Cas9 being used. In some embodiments, the crRNA comprises (5′ to 3′) at least a spacer sequence and a first complementarity domain. The first complementary domain is sufficiently complementary to a second complementarity domain, which may be part of the same molecule in the case of an sgRNA or in a tracrRNA in the case of a dual or modular gRNA, to form a duplex. See, e.g., US 2017/0007679 for detailed discussion of crRNA and gRNA domains, including first and second complementarity domains.

[0124] A single-molecule guide RNA (sgRNA) can comprise, in the 5′ to 3′ direction, an optional spacer extension sequence, a spacer sequence, a minimum CRISPR repeat sequence, a single-molecule guide linker, a minimum tracrRNA sequence, a 3′ tracrRNA sequence and/or an optional tracrRNA extension sequence. The optional tracrRNA extension can comprise elements that contribute additional functionality (e.g., stability) to the guide RNA. The single-molecule guide linker can link the minimum CRISPR repeat and the minimum tracrRNA sequence to form a hairpin structure. The optional tracrRNA extension can comprise one or more hairpins. In particular embodiments, the disclosure provides for an sgRNA comprising a spacer sequence and a tracrRNA sequence.

[0125] The guide RNA can be considered to comprise a scaffold sequence necessary for endonuclease binding and a spacer sequence required to bind to the genomic target sequence. In some embodiments, the guide RNA comprises any of the scaffold sequences disclosed herein and any of the spacer sequences disclosed herein. In some embodiments, the guide RNA comprises any of the scaffold sequences disclosed herein and any of the spacer sequences disclosed herein without any nucleotides between the scaffold sequence and the spacer sequence. An exemplary scaffold sequence suitable for use with SaCas9 to follow the guide sequence at its 3′ end is: GTTTAAGTACTCTGTGCTGGAAACAGCACAGAATCTACTTAAACAAGGCAAAATGCCGT GTTTATCTCGTCAACTTGTTGGCGAGA (SEQ ID NO: 500) in 5′ to 3′ orientation. In some embodiments, an exemplary scaffold sequence for use with SaCas9 to follow the 3′ end of the guide sequence is a sequence that is at least 80%, 85%, 90%, 91%, 92%, 93%, 94%, 95%, 96%, 97%, 98%, 99% or 100% identical to SEQ ID NO: 500, or a sequence that differs from SEQ ID NO: 500 by no more than 1, 2, 3, 4, 5, 10, 15, 20, or 25 nucleotides.

[0126] In some embodiments, a variant of an SaCas9 scaffold sequence may be used. In some embodiments, the SaCas9 scaffold to follow the guide sequence at its 3′ end is referred to as “SaScaffoldV1” and is: GTTTTAGTACTCTGGAAACAGAATCTACTAAAACAAGGCAAAATGCCGTGTTTATCTCGT CAACTTGTTGGCGAGAT (SEQ ID NO: 501) in 5′ to 3′ orientation. In some embodiments, an exemplary scaffold sequence for use with SaCas9 to follow the 3′ end of the guide sequence is a sequence that is at least 80%, 85%, 90%, 91%, 92%, 93%, 94%, 95%, 96%, 97%, 98%, 99% or 100% identical to SEQ ID NO: 501, or a sequence that differs from SEQ ID NO: 501 by no more than 1, 2, 3, 4, 5, 10, 15, 20, or 25 nucleotides.

[0127] In some embodiments, a variant of an SaCas9 scaffold sequence may be used. In some embodiments, the SaCas9 scaffold to follow the guide sequence at its 3′ end is referred to as “SaScaffoldV2” and is: GTTTAAGTACTCTGTGCTGGAAACAGCACAGAATCTACTTAAACAAGGCAAAATGCCGT GTTTATCTCGTCAACTTGTTGGCGAGAT (SEQ ID NO: 502) in 5′ to 3′ orientation. In some embodiments, an exemplary scaffold sequence for use with SaCas9 to follow the 3′ end of the guide sequence is a sequence that is at least 80%, 85%, 90%, 91%, 92%, 93%, 94%, 95%, 96%, 97%, 98%, 99% or 100% identical to SEQ ID NO: 502, or a sequence that differs from SEQ ID NO: 502 by no more than 1, 2, 3, 4, 5, 10, 15, 20, or 25 nucleotides.

[0128] In some embodiments, a variant of an SaCas9 scaffold sequence may be used. In some embodiments, the SaCas9 scaffold to follow the guide sequence at its 3′ end is referred to as “SaScaffoldV3” and is: GTTTAAGTACTCTGGAAACAGAATCTACTTAAACAAGGCAAAATGCCGTGTTTATCTCGT CAACTTGTTGGCGAGAT (SEQ ID NO: 503) in 5′ to 3′ orientation. In some embodiments, an exemplary scaffold sequence for use with SaCas9 to follow the 3′ end of the guide sequence is a sequence that is at least 80%, 85%, 90%, 91%, 92%, 93%, 94%, 95%, 96%, 97%, 98%, 99% or 100% identical to SEQ ID NO: 503, or a sequence that differs from SEQ ID NO: 503 by no more than 1, 2, 3, 4, 5, 10, 15, 20, or 25 nucleotides.

[0129] In some embodiments, a variant of an SaCas9 scaffold sequence may be used. In some embodiments, the SaCas9 scaffold to follow the guide sequence at its 3′ end is referred to as “SaScaffoldV5” and is: GTTTCAGTACTCTGGAAACAGAATCTACTGAAACAAGGCAAAATGCCGTGTTTATCTCGT CAACTTGTTGGCGAGAT (SEQ ID NO: 504) in 5′ to 3′ orientation. In some embodiments, an exemplary scaffold sequence for use with SaCas9 to follow the 3′ end of the guide sequence is a sequence that is at least 80%, 85%, 90%, 91%, 92%, 93%, 94%, 95%, 96%, 97%, 98%, 99% or 100% identical to SEQ ID NO: 504, or a sequence that differs from SEQ ID NO: 504 by no more than 1, 2, 3, 4, 5, 10, 15, 20, or 25 nucleotides.

[0130] Two exemplary scaffold sequences suitable for use with SluCas9 to follow the guide sequence at its 3′ end are: GTTTTAGTACTCTGGAAACAGAATCTACTGAAACAAGACAATATGTCGTGTTTATCCCAT CAATTTATTGGTGGGA (SEQ ID NO: 600), orGTTTAAGTACTCTGTGCTGGAAACAGCACAGAATCTACTGAAACAAGACAATATGTCG TGTTTATCCCATCAATTTATTGGTGGGA (SEQ ID NO: 601) in 5′ to 3′ orientation. In some embodiments, an exemplary sequence for use with SluCas9 to follow the 3′ end of the guide sequence is a sequence that is at least 80%, 85%, 90%, 91%, 92%, 93%, 94%, 95%, 96%, 97%, 98%, 99% or 100% identical to SEQ ID NO: 600 or SEQ ID NO: 601, or a sequence that differs from SEQ ID NO: 600 or SEQ ID NO: 601 by no more than 1, 2, 3, 4, 5, 10, 15, 20, or 25 nucleotides.

[0131] Exemplary scaffold sequences suitable for use with SluCas9 to follow the guide sequence at its 3′ end are also shown below in the 5′ to 3′ orientation.

TABLE 2

| | | | | Streak of |
|---|---|---|---|---|
| | | | | Homology to |
| Scaffold | SEQ | | Homology | Slu v5 |
| ID | ID NO | Scaffold Sequence (5' to 3') | to Slu v5 | (# nucleotides) |
| Wildtype | 900 | GTTTTAGTACTCTGGAAACAGAATCTACTGAA | N/A | N/A |
| | | ACAAGACAATATGTCGTGTTTATCCCATCAAT | | |
| | | TTATTGGTGGGAT | | |
| Slu- | 601 | GTTTAAGTACTCTGTGCTGGAAACAGCACAG | N/A | N/A |
| VCGT- | | AATCTACTGAAACAAGACAATATGTCGTGTTT | | |
| 4.5 | | ATCCCATCAATTTATTGGTGGGA | | |
| Slu_v5 | 901 | GTTTCAGTACTCTGGAAACAGAATCTACTGAA | 100.00% | 77 |
| | | ACAAGACAATATGTCGTGTTTATCCCATCAAT | | |
| | | TTATTGGTGGGAT | | |
| Slu_v5-1 | 902 | GTTTggTaACcTaGGAAACTagATCTTaccAAACA | 87.50% | 47 |
| | | AGACAATATGTCGTGTTTATCCCATCAATTTA | | |
| | | TTGGTGGGAT | | |
| Slu_v5-2 | 903 | GTTTCAGTACTCTGGAAACAGAATCTACTGAA | 96.10% | 37 |
| | | ACAAGgCAAaATGcCGTGTTTATCCCATCAATT | | |
| | | TATTGGTGGGAT | | |
| Slu_v5-3 | 904 | GTTTCAGTACTCTGGAAACAGAATCTACTGAA | 94.81% | 48 |
| | | ACAAGACAATATGTCGcgcccaTCCCATCAATTT | | |
| | | ATTGGTGGGAT | | |
| Slu_v5-4 | 905 | GTTTCAGTACTCTGGAAACAGAATCTACTGAA | 91.55% | 55 |
| | | ACAAGACAATATGTCGTGTTTATgggTTgAATT | | |
| | | TATTcGacccAT | | |
| Slu_v5-5 | 906 | GTTTggTaACcTaGGAAACTagATCTTaccAAACA | 83.75% | 31 |
| | | AGgCAAaATGcCGTGTTTATCCCATCAATTTAT | | |
| | | TGGTGGGAT | | |
| Slu_v5-6 | 907 | GTTTggTaACcTaGGAAACTagATCTTaccAAACA | 82.50% | 23 |
| | | AGACAATATGTCGcgcccaTCCCATCAATTTATT | | |
| | | GGTGGGAT | | |
| Slu_v5-7 | 908 | GTTTggTaACcTaGGAAACTagATCTTaccAAACA | 78.38% | 25 |
| | | AGACAATATGTCGTGTTTATgggTTgAATTTAT | | |
| | | TcGacccAT | | |
| Slu_v5-8 | 909 | GTTTCAGTACTCTGGAAACAGAATCTACTGAA | 90.91% | 37 |
| | | ACAAGgCAAaATGcCGcgcccaTCCCATCAATTTA | | |
| | | TTGGTGGGAT | | |
| Slu_v5-9 | 910 | GTTTCAGTACTCTGGAAACAGAATCTACTGAA | 87.32% | 37 |
| | | ACAAGgCAAaATGcCGTGTTTATgggTTgAATTT | | |
| | | ATTcGacccAT | | |
| Slu_v5- | 911 | GTTTCAGTACTCTGGAAACAGAATCTACTGAA | 82.89% | 48 |
| 10 | | ACAAGACAATATGTCGcgcccaTgggTTgAATTTA | | |
| | | TTcGacccAT | | |
| Slu_v5- | 912 | GTTTggTaACcTaGGAAACTagATCTTaccAAACA | 78.75% | 23 |
| 11 | | AGgCAAaATGcCGcgcccaTCCCATCAATTTATTG | | |
| | | GTGGGAT | | |
| Slu_v5- | 913 | GTTTggTaACcTaGGAAACTagATCTTaccAAACA | 74.32% | 9 |
| 12 | | AGgCAAaATGcCGTGTTTATgggTTgAATTTATTc | | |
| | | GacccAT | | |
| Slu_v5- | 914 | GTTTggTaACcTaGGAAACTagATCTTaccAAACA | 70.89% | 18 |
| 13 | | AGACAATATGTCGcgcccaTgggTTgAATTTATTc | | |
| | | GacccAT | | |
| Slu_v5- | 915 | GTTTCAGTACTCTGGAAACAGAATCTACTGAA | 78.95% | 37 |
| 14 | | ACAAGgCAAaATGcCGcgcccaTgggTTgAATTTAT | | |
| | | TcGacccAT | | |
| Slu_v5- | 916 | GTTTggTaACcTaGGAAACTagATCTTaccAAACA | 67.09% | 8 |
| 15 | | AGgCAAaATGcCGcgcccaTgggTTgAATTTATTcGa | | |
| | | cccAT | | |
| Slu_v4 | 917 | GTTTCAGTACTCTGTGCTGGAAACAGCACAGA | N/A | N/A |
| | | ATCTACTGAAACAAGACAATATGTCGTGTTTA | | |
| | | TCCCATCAATTTATTGGTGGGAT | | |

[0132] In some embodiments, the scaffold sequence suitable for use with SaCas9 to follow the guide sequence at its 3′ end is selected from any one of SEQ ID NOs: 500-504 in 5′ to 3 orientation. In some embodiments, an exemplary sequence for use with SaCas9 to follow the 3′ end of the guide sequence is a sequence that is at least 65%, 70%, 75%, 80%, 85%, 90%, 91%, 92%, 93%, 94%, 95%, 96%, 97%, 98%, 99% or 100% identical to any one off SEQ ID NOs: 500-504, or a sequence that differs from any one of SEQ ID NOs: 500-504 by no more than 1, 2, 3, 4, 5, 10, 15, 20, or 25 nucleotides.

[0133] In some embodiments, the scaffold sequence suitable for use with SluCas9 to follow the guide sequence at its 3′ end is selected from any one of SEQ ID NOs: 900 or 601, or 901-917 in 5′ to 3 orientation. In some embodiments, an exemplary sequence for use with SluCas9 to follow the 3′ end of the guide sequence is a sequence that is at least 65%, 70%, 75%, 80%, 85%, 90%, 91%, 92%, 93%, 94%, 95%, 96%, 97%, 98%, 99% or 100% identical to any one off SEQ ID NOs: 900 or 601, or 901-917, or a sequence that differs from any one of SEQ ID NOs: 900 or 601, or 901-917 by no more than 1, 2, 3, 4, 5, 10, 15, 20, or 25 nucleotides.

[0134] In some embodiments, any scaffold sequence (e.g., any of the scaffold sequences disclosed herein) is suitable for use with any sRGN disclosed herein, such as any one of sRGN1, sRGN2, sRGN3, sRGN3.1, sRGN3.2, sRGN3.3, sRGN4, or a nucleic acid molecule encoding the same. In some embodiments, a scaffold sequence suitable for use with a sRGN, such as at the 3′ end of a guide RNA sequence within an expression vector comprising the sRGN (e.g., an expression vector as shown in FIG. 5) is selected from any one of SEQ ID NOs: 500-504, 601, or 900-917. In some embodiments, a scaffold sequence suitable for use with a sRGN, such as at the 3′ end of a guide RNA sequence within an expression vector comprising the sRGN (e.g., an expression vector as shown in FIG. 5) is a sequence that is at least 65%, 70%, 75%, 80%, 85%, 90%, 91%, 92%, 93%, 94%, 95%, 96%, 97%, 98%, 99% or 100% identical to any one of SEQ ID NOs: 500-504, 601, or 900-917, or a sequence that differs from any one of SEQ ID NOs: 500-504, 601, or 900-917 by no more than 1, 2, 3, 4, 5, 10, 15, 20, or 25 nucleotides.

[0135] In some embodiments, the nucleic acid encoding the gRNA comprises a sequence comprising SEQ ID NO: 500. In some embodiments, the nucleic acid encoding the gRNA comprises a sequence comprising SEQ ID NO: 501. In some embodiments, the nucleic acid encoding the gRNA comprises a sequence comprising SEQ ID NO: 502. In some embodiments, the nucleic acid encoding the gRNA comprises a sequence comprising SEQ ID NO: 503. In some embodiments, the nucleic acid encoding the gRNA comprises a sequence comprising SEQ ID NO: 504. In some embodiments, comprising a pair of gRNAs, one of the gRNAs comprises a sequence selected from any one of SEQ ID NOs: 500-504. In some embodiments, comprising a pair of gRNAs, both of the gRNAs comprise a sequence selected from any one of SEQ ID NOs: 500-504. In some embodiments, comprising a pair of gRNAs, the nucleotides 3′ of the guide sequence of the gRNAs are the same sequence. In some embodiments, comprising a pair of gRNAs, the nucleotides 3′ of the guide sequence of the gRNAs are different sequences.

[0136] In some embodiments, the nucleic acid encoding the gRNA comprises a sequence comprising SEQ ID NO: 900. In some embodiments, the nucleic acid encoding the gRNA comprises a sequence comprising SEQ ID NO: 601. In some embodiments, the nucleic acid encoding the gRNA comprises a sequence comprising SEQ ID NO: 900. In some embodiments, the nucleic acid encoding the gRNA comprises a sequence comprising SEQ ID NO: 901. In some embodiments, the nucleic acid encoding the gRNA comprises a sequence comprising SEQ ID NO: 902. In some embodiments, the nucleic acid encoding the gRNA comprises a sequence comprising SEQ ID NO: 903. In some embodiments, the nucleic acid encoding the gRNA comprises a sequence comprising SEQ ID NO: 904. In some embodiments, the nucleic acid encoding the gRNA comprises a sequence comprising SEQ ID NO: 905. In some embodiments, the nucleic acid encoding the gRNA comprises a sequence comprising SEQ ID NO: 906. In some embodiments, the nucleic acid encoding the gRNA comprises a sequence comprising SEQ ID NO: 907. In some embodiments, the nucleic acid encoding the gRNA comprises a sequence comprising SEQ ID NO: 908. In some embodiments, the nucleic acid encoding the gRNA comprises a sequence comprising SEQ ID NO: 909. In some embodiments, the nucleic acid encoding the gRNA comprises a sequence comprising SEQ ID NO: 910. In some embodiments, the nucleic acid encoding the gRNA comprises a sequence comprising SEQ ID NO: 911. In some embodiments, the nucleic acid encoding the gRNA comprises a sequence comprising SEQ ID NO: 912. In some embodiments, the nucleic acid encoding the gRNA comprises a sequence comprising SEQ ID NO: 913. In some embodiments, the nucleic acid encoding the gRNA comprises a sequence comprising SEQ ID NO: 914. In some embodiments, the nucleic acid encoding the gRNA comprises a sequence comprising SEQ ID NO: 915. In some embodiments, the nucleic acid encoding the gRNA comprises a sequence comprising SEQ ID NO: 916. In some embodiments, the nucleic acid encoding the gRNA comprises a sequence comprising SEQ ID NO: 917. In some embodiments, comprising a pair of gRNAs, one of the gRNAs comprises a sequence selected from any one of SEQ ID NOs: 900 or 601, or 901-917. In some embodiments, comprising a pair of gRNAs, both of the gRNAs comprise a sequence selected from any one of SEQ ID NOs: 900 or 601, or 901-917. In some embodiments, comprising a pair of gRNAs, the nucleotides 3′ of the guide sequence of the gRNAs are the same sequence. In some embodiments, comprising a pair of gRNAs, the nucleotides 3′ of the guide sequence of the gRNAs are different sequences.

[0137] In some embodiments, the scaffold sequence comprises one or more alterations in the stem loop 1 as compared to the stem loop 1 of a wildtype SluCas9 scaffold sequence (e.g., a scaffold comprising the sequence of SEQ ID NO: 900) or a reference SluCas9 scaffold sequence (e.g., a scaffold comprising the sequence of SEQ ID NO: 901). In some embodiments, the scaffold sequence comprises one or more alterations in the stem loop 2 as compared to the stem loop 2 of a wildtype SluCas9 scaffold sequence (e.g., a scaffold comprising the sequence of SEQ ID NO: 900) or a reference SluCas9 scaffold sequence (e.g., a scaffold comprising the sequence of SEQ ID NO: 901). In some embodiments, the scaffold sequence comprises one or more alterations in the tetraloop as compared to the tetraloop of a wildtype SluCas9 scaffold sequence (e.g., a scaffold comprising the sequence of SEQ ID NO: 900) or a reference SluCas9 scaffold sequence (e.g., a scaffold comprising the sequence of SEQ ID NO: 901). In some embodiments, the scaffold sequence comprises one or more alterations in the repeat region as compared to the repeat region of a wildtype SluCas9 scaffold sequence (e.g., a scaffold comprising the sequence of SEQ ID NO: 900) or a reference SluCas9 scaffold sequence (e.g., a scaffold comprising the sequence of SEQ ID NO: 901). In some embodiments, the scaffold sequence comprises one or more alterations in the anti-repeat region as compared to the anti-repeat region of a wildtype SluCas9 scaffold sequence (e.g., a scaffold comprising the sequence of SEQ ID NO: 900) or a reference SluCas9 scaffold sequence (e.g., a scaffold comprising the sequence of SEQ ID NO: 901). In some embodiments, the scaffold sequence comprises one or more alterations in the linker region as compared to the linker region of a wildtype SluCas9 scaffold sequence (e.g., a scaffold comprising the sequence of SEQ ID NO: 900) or a reference SluCas9 scaffold sequence (e.g., a scaffold comprising the sequence of SEQ ID NO: 901). See, e.g., Nishimasu et al., 2015, Cell, 162:1113-1126 for description of regions of a scaffold.

[0138] Where a tracrRNA is used, in some embodiments, it comprises (5′ to 3′) a second complementary domain and a proximal domain. In the case of a sgRNA, guide sequences together with additional nucleotides (e.g., SEQ ID Nos: 500-504 (for SaCas9), and 900 or 601, or 901-917 (for SluCas9)) form or encode a sgRNA. In some embodiments, an sgRNA comprises (5′ to 3′) at least a spacer sequence, a first complementary domain, a linking domain, a second complementary domain, and a proximal domain. A sgRNA or tracrRNA may further comprise a tail domain. The linking domain may be hairpin-forming. See, e.g., US 2017/0007679 for detailed discussion and examples of crRNA and gRNA domains, including second complementarity domains, linking domains, proximal domains, and tail domains.

[0139] In some embodiments, the disclosure provides for specific nucleic acid sequences encoding one or more guide RNA components (e.g., any of the spacer and or scaffold sequences disclosed herein). The disclosure contemplates RNA equivalents of any of the DNA sequences provided herein (i.e., in which “T”s are replaced with “U”s), or DNA equivalents of any of the RNA sequences provided herein (i.e., in which “U”s are replaced with “T”s), as well as complements (including reverse complements) of any of the sequences disclosed herein.

[0140] In some embodiments, a composition is provided comprising a guide RNA, or nucleic acid encoding a guide RNA, wherein the guide RNA further comprises a trRNA. In each composition and method embodiment described herein, the crRNA (comprising the spacer sequence) and trRNA may be associated as a single RNA (sgRNA) or may be on separate RNAs (dgRNA). In the context of sgRNAs, the crRNA and trRNA components may be covalently linked, e.g., via a phosphodiester bond or other covalent bond.

### Vectors

[0141] In any embodiment comprising a nucleic acid molecule encoding a guide RNA and/or a Cas9, the nucleic acid molecule may be a vector. In some embodiments, a composition is provided comprising a single nucleic acid molecule encoding at least one guide RNA and Cas9, wherein the nucleic acid molecule is a vector. In some embodiments, a composition is provided comprising more than one nucleic acid molecule encoding a guide RNA and Cas9, wherein the nucleic acid molecule is a vector. In some embodiments, a composition is provided comprising more than one nucleic acid molecule wherein one molecule encodes one or more guide RNA, and the other molecule encodes Cas9 plus or minus at least one guide RNA, wherein the nucleic acid molecule is a vector.

[0142] Any type of vector, such as any of those described herein, may be used. In some embodiments, the vector is a lipid nanoparticle. In some embodiments, the vector is a viral vector. In some embodiments, the viral vector is a non-integrating viral vector (i.e., that does not insert sequence from the vector into a host chromosome). In some embodiments, the viral vector is an adeno-associated virus vector (AAV), a lentiviral vector, an integrase-deficient lentiviral vector, an adenoviral vector, a vaccinia viral vector, an alphaviral vector, or a herpes simplex viral vector. In some embodiments, the vector comprises a muscle-specific promoter. Exemplary muscle-specific promoters include a muscle creatine kinase promoter, a desmin promoter, an MHCK7 promoter, or an SPc5-12 promoter. See US 2004/0175727 A1; Wang et al., Expert Opin Drug Deliv. (2014) 11, 345-364; Wang et al., Gene Therapy (2008) 15, 1489-1499. In some embodiments, the muscle-specific promoter is a CK8 promoter. In some embodiments, the muscle-specific promoter is a CK8e promoter. In any of the foregoing embodiments, the vector may be an adeno-associated virus vector (AAV).

[0143] In some embodiment, the vector is a lipid nanoparticle comprising an endonuclease (e.g., any of the endonucleases disclosed herein) and one or more of any of the guide RNAs disclosed herein. In some embodiments, the vector is a lipid nanoparticle comprising a nucleic acid encoding an endonuclease (e.g., any of the endonucleases disclosed herein) and one or more of any of the guide RNAs disclosed herein. In some embodiments, the vector is a lipid nanoparticle comprising a nucleic acid encoding an endonuclease (e.g., any of the endonucleases disclosed herein) and a nucleic acid encoding one or more of any of the guide RNAs disclosed herein.

[0144] Where a vector is used, it may be a viral vector, such as a non-integrating viral vector. In some embodiments, the viral vector is an adeno-associated virus vector, a lentiviral vector, an integrase-deficient lentiviral vector, an adenoviral vector, a vaccinia viral vector, an alphaviral vector, or a herpes simplex viral vector. In some embodiments, the viral vector is an adeno-associated virus (AAV) vector. In some embodiments, the AAV vector is an AAV1, AAV2, AAV3, AAV4, AAV5, AAV6, AAV7, AAV8, AAVrh10 (see, e.g., SEQ ID NO: 81 of U.S. Pat. No. 9,790,472, which is incorporated by reference herein in its entirety), AAVrh74 (see, e.g., SEQ ID NO: 1 of US 2015/0111955, which is incorporated by reference herein in its entirety), or AAV9 vector, wherein the number following AAV indicates the AAV serotype. In some embodiments, the AAV vector is a single-stranded AAV (ssAAV). In some embodiments, the AAV vector is a double-stranded AAV (dsAAV). Any variant of an AAV vector or serotype thereof, such as a self-complementary AAV (scAAV) vector, is encompassed within the general terms AAV vector, AAV1 vector, etc. See, e.g., McCarty et al., Gene Ther. 2001; 8:1248-54, Naso et al., BioDrugs 2017; 31:317-334, and references cited therein for detailed discussion of various AAV vectors. In some embodiments, the AAV vector size is measured in length of nucleotides from ITR to ITR, inclusive of both ITRs. In some embodiments, the AAV vector is less than 5 kb in size from ITR to ITR, inclusive of both ITRs. In particular embodiments, the AAV vector is less than 4.9 kb from ITR to ITR in size, inclusive of both ITRs. In further embodiments, the AAV vector is less than 4.85 kb in size from ITR to ITR, inclusive of both ITRs. In further embodiments, the AAV vector is less than 4.8 kb in size from ITR to ITR, inclusive of both ITRs. In further embodiments, the AAV vector is less than 4.75 kb in size from ITR to ITR, inclusive of both ITRs. In further embodiments, the AAV vector is less than 4.7 kb in size from ITR to ITR, inclusive of both ITRs. In some embodiments, the vector is between 3.9-5 kb, 4-5 kb, 4.2-5 kb, 4.4-5 kb, 4.6-5 kb, 4.7-5 kb, 3.9-4.9 kb, 4.2-4.9 kb, 4.4-4.9 kb, 4.7-4.9 kb, 3.9-4.85 kb, 4.2-4.85 kb, 4.4-4.85 kb, 4.6-4.85 kb, 4.7-4.85 kb, 4.7-4.9 kb, 3.9-4.8 kb, 4.2-4.8 kb, 4.4-4.8 kb or 4.6-4.8 kb from ITR to ITR in size, inclusive of both ITRs. In some embodiments, the vector is between 4.4-4.85 kb in size from ITR to ITR, inclusive of both ITRs. In some embodiments, the vector is an AAV9 vector.

[0145] In some embodiments, the vector (e.g., viral vector, such as an adeno-associated viral vector) comprises a tissue-specific (e.g., muscle-specific) promoter, e.g., which is operatively linked to a sequence encoding the guide RNA and/or the Cas protein. In some embodiments, the muscle-specific promoter is a muscle creatine kinase promoter, a desmin promoter, an MHCK7 promoter, or an SPc5-12 promoter. In some embodiments, the muscle-specific promoter is a CK8 promoter. In some embodiments, the muscle-specific promoter is a CK8e promoter. Muscle-specific promoters are described in detail, e.g., in US2004/0175727 A1; Wang et al., Expert Opin Drug Deliv. (2014) 11, 345-364; Wang et al., Gene Therapy (2008) 15, 1489-1499. In some embodiments, the tissue-specific promoter is a neuron-specific promoter, such as an enolase promoter. See, e.g., Naso et al., BioDrugs 2017; 31:317-334; Dashkoff et al., Mol Ther Methods Clin Dev. 2016; 3:16081, and references cited therein for detailed discussion of tissue-specific promoters including neuron-specific promoters.

[0146] In some embodiments, in addition to guide RNA and Cas9 sequences, the vectors further comprise nucleic acids that do not encode guide RNAs. Nucleic acids that do not encode guide RNA and Cas9 include, but are not limited to, promoters, enhancers, and regulatory sequences. In some embodiments, the vector comprises one or more nucleotide sequence(s) encoding a crRNA, a trRNA, or a crRNA and trRNA. In some embodiments, the muscle specific promoter is the CK8 promoter. The CK8 promoter has the following sequence (SEQ ID NO. 700):

| | |
|---|---|
| 1 | CTAGACTAGC ATGCTGCCCA TGTAAGGAGG CAAGGCCTGG |
| | GGACACCCGA GATGCCTGGT |
| 61 | TATAATTAAC CCAGACATGT GGCTGCCCCC CCCCCCCCAA |
| | CACCTGCTGC CTCTAAAAAT |
| 121 | AACCCTGCAT GCCATGTTCC CGGCGAAGGG CCAGCTGTCC |
| | CCCGCCAGCT AGACTCAGCA |
| 181 | CTTAGTTTAG GAACCAGTGA GCAAGTCAGC CCTTGGGGCA |
| | GCCCATACAA GGCCATGGGG |
| 241 | CTGGGCAAGC TGCACGCCTG GGTCCGGGGT GGGCACGGTG |
| | CCCGGGCAAC GAGCTGAAAG |
| 301 | CTCATCTGCT CTCAGGGGCC CCTCCCTGGG GACAGCCCCT |
| | CCTGGCTAGT CACACCCTGT |
| 361 | AGGCTCCTCT ATATAACCCA GGGGCACAGG GGCTGCCCTC |
| | ATTCTACCAC CACCTCCACA |
| 421 | GCACAGACAG ACACTCAGGA GCCAGCCAGC |

[0147] In some embodiments, the muscle-cell cell specific promoter is a variant of the CK8 promoter, called CK8e. In some embodiments, the size of the CK8e promoter is 436 bp. The CK8e promoter has the following sequence (SEQ ID NO. 701):

| | |
|---|---|
| 1 | TGCCCATGTA AGGAGGCAAG GCCTGGGGAC ACCCGAGATG |
| | CCTGGTTATA ATTAACCCAG |
| 61 | ACATGTGGCT GCCCCCCCCC CCCCAACACC TGCTGCCTCT |
| | AAAAATAACC CTGCATGCCA |
| 121 | TGTTCCCGGC GAAGGGCCAG CTGTCCCCCG CCAGCTAGAC |
| | TCAGCACTTA GTTTAGGAAC |
| 181 | CAGTGAGCAA GTCAGCCCTT GGGGCAGCCC ATACAAGGCC |
| | ATGGGGCTGG GCAAGCTGCA |
| 241 | CGCCTGGGTC CGGGGTGGGC ACGGTGCCCG GGCAACGAGC |
| | TGAAAGCTCA TCTGCTCTCA |
| 301 | GGGGCCCCTC CCTGGGGACA GCCCCTCCTG GCTAGTCACA |
| | CCCTGTAGGC TCCTCTATAT |
| 361 | AACCCAGGGG CACAGGGGCT GCCCTCATTC TACCACCACC |
| | TCCACAGCAC AGACAGACAC |
| 421 | TCAGGAGCCA GCCAGC |

[0148] In some embodiments, the Ck8e promoter comprises a nucleotide sequence that is at least 90%, 91%, 92%, 93%, 94%, 95%, 96%, 97%, 98%, 99% or 100% identical to the sequence of SEQ ID NO: 701.

[0149] In some embodiments, the vector comprises one or more of a U6, H1, or 7SK promoter. In some embodiments, the U6 promoter is the human U6 promoter (e.g., the U6L promoter or U6S promoter). In some embodiments, the promoter is the murine U6 promoter. In some embodiments, the 7SK promoter is a human 7SK promoter. In some embodiments, the 7SK promoter is the 7SK1 promoter. In some embodiments, the 7SK promoter is the 7SK2 promoter. In some embodiments, the H1 promoter is a human H1 promoter (e.g., the H1L promoter or the HIS promoter). In some embodiments, the vector comprises multiple guide sequences, wherein each guide sequence is under the control of a separate promoter. In some embodiments, each of the multiple guide sequences comprises a different sequence. In some embodiments, each of the multiple guide sequences comprise the same sequence (e.g., each of the multiple guide sequences comprise the same spacer sequence). In some embodiments, each of the multiple guide sequences comprises the same spacer sequence and the same scaffold sequence. In some embodiments, each of the multiple guide sequences comprises different spacer sequences and different scaffold sequences. In some embodiments, each of the multiple guide sequences comprises the same spacer sequence, but comprises a different scaffold sequence. In some embodiments, each of the multiple guide sequences comprises different spacer sequences and different scaffold sequences. In some embodiments, each of the separate promoters comprises the same nucleotide sequence (e.g., the U6 promoter sequence). In some embodiments, each of the separate promoters comprises a different nucleotide sequence (e.g., the U6, H1, and/or 7SK promoter sequence).

[0150] In some embodiments, the U6 promoter comprises a nucleotide sequence that is at least 90%, 91%, 92%, 93%, 94%, 95%, 96%, 97%, 98%, 99% or 100% identical to the sequence of SEQ ID NO: 702:

| | |
|---|---|
| cgagtccaac acccgtggga atcccatggg caccatggcc cctcgctcca aaaatgcttt | 60 |
| cgcgtcgcgc agacactgct cggtagtttc ggggatcagc gtttgagtaa gagcccgcgt | 120 |
| ctgaaccctc cgcgccgccc cggccccagt ggaaagacgc gcaggcaaaa cgcaccacgt | 180 |
| gacggagcgt gaccgcgcgc cgagcgcgcg ccaaggtcgg gcaggaagag ggcctatttc | 240 |
| ccatgattcc ttcatatttg catatacgat acaaggctgt tagagagata attagaatta | 300 |
| atttgactgt aaacacaaag atattagtac aaaatacgtg acgtagaaag taataatttc | 360 |
| ttgggtagtt tgcagtttta aaattatgtt ttaaaatgga ctatcatatg cttaccgtaa | 420 |
| cttgaaagta tttcgatttc ttggctttat atatcttgtg gaaaggacga aa | 472 |

[0151] In some embodiments, the H1 promoter comprises a nucleotide sequence that is at least 90%, 91%, 92%, 93%, 94%, 95%, 96%, 97%, 98%, 99% or 100% identical to the sequence of SEQ ID NO: 703:

| | |
|---|---|
| gctcggcgcg cccatatttg catgtcgcta tgtgttctgg gaaatcacca taaacgtgaa | 60 |
| atgtctttgg atttgggaat cttataagtt ctgtatgaga ccacggta | 108 |

[0152] In some embodiments, the 7SK promoter comprises a nucleotide sequence that is at least 90%, 91%, 92%, 93%, 94%, 95%, 96%, 97%, 98%, 99% or 100% identical to the sequence of SEQ ID NO: 704:

| | |
|---|---|
| tgacggcgcg ccctgcagta tttagcatgc cccacccatc tgcaaggcat tctggatagt | 60 |
| gtcaaaacag ccggaaatca agtccgttta tctcaaactt tagcattttg ggaataaatg | 120 |
| atatttgcta tgctggttaa attagatttt agttaaattt cctgctgaag ctctagtacg | 180 |
| ataagtaact tgacctaagt gtaaagttga gatttccttc aggtttatat agcttgtgcg | 240 |
| ccgcctgggt a | 251 |

[0153] In some embodiments, the U6 promoter is a hU6c promoter and comprises a nucleotide sequence that is at least 90%, 91%, 92%, 93%, 94%, 95%, 96%, 97%, 98%, 99% or 100% identical to the sequence of SEQ ID NO: 705:

GAGGGCCTATTTCCCATGATTCCTTCATATTTGCATATACGATACAAGGC
TGTTAGAGAGATAATTGGAATTAATTTGACTGTAAACACAAAGATATTAG
TACAAAATACGTGACGTAGAAAGTAATAATTTCTTGGGTAGTTTGCAGTT
TTAAAATTATGTTTTAAAATGGACTATCATATGCTTACCGTAACTTGAAA
GTATTTCGATTTCTTGGCTTTATATATCTTGTGGAAAGGACGAAACACC.

[0154] In some embodiments, the U6 promoter is a variant of the hU6c promoter. In some embodiments, the variant of the hU6c promoter comprises alternative nucleotides as compared to the sequence of SEQ ID NO: 705. In some embodiments, the variant of the hU6c promoter comprises fewer nucleotides as compared to the 249 nucleotides of SEQ ID NO: 705. In some embodiments, the variant of the hU6c promoter has fewer nucleotides in the nucleosome binding sequence of the hU6c promoter of SEQ ID NO: 705. In some embodiments, the variant of the hU6c promoter lacks all of or at least a portion of (e.g., at least 5, 10, 15, 20, 25, or 30 nucleotides) the nucleotides corresponding to nucleotides 96-125 of SEQ ID NO: 705. In some embodiments, the variant of the hU6c promoter lacks all of or at least a portion of (e.g., at least 5, 10, 15, 20, 25, 30, 35, 40, 45, 50, 55, or 60 nucleotides) the nucleotides corresponding to nucleotides 81-140 of SEQ ID NO: 705. In some embodiments, the variant of the hU6c promoter lacks all of or at least a portion of (e.g., at least 10, 20, 30, 40, 50, 60, 65, 70, 75, 80, or 85 nucleotides) the nucleotides corresponding to nucleotides 66-150 of SEQ ID NO: 705. In some embodiments, the variant of the hU6c promoter lacks all of or at least a portion of (e.g., at least 10, 20, 30, 40, 50, 60, 70, 80, 90, 100, 110, or 120 nucleotides) the nucleotides corresponding to nucleotides 51-170 of SEQ ID NO: 705. In some embodiments, the variant of the hU6c promoter lacks the nucleotides corresponding to nucleotides 96-125 of SEQ ID NO: 705. In some embodiments, the variant of the hU6c promoter comprises 129-219 nucleotides. In some embodiments, the variant of the hU6c promoter comprises 219 nucleotides. In some embodiments, the variant of the hU6c promoter comprises 189 nucleotides. In some embodiments, the variant of the hU6c promoter comprises 159 nucleotides. In some embodiments, the variant of the hU6c promoter comprises 129 nucleotides.

[0155] In some embodiments, the U6 promoter is hU6d30 and comprises a nucleotide sequence that is at least 90%, 91%, 92%, 93%, 94%, 95%, 96%, 97%, 98%, 99% or 100% identical to the sequence of SEQ ID NO: 9001:

GAGGGCCTATTTCCCATGATTCCTTCATATTTGCATATACGATACAAGGC
TGTTAGAGAGATAATTGGAATTAATTTGACTGTAAACACAAAGATATAAT
TTCTTGGGTAGTTTGCAGTTTTAAAATTATGTTTTAAAATGGACTATCAT
ATGCTTACCGTAACTTGAAAGTATTTCGATTTCTTGGCTTTATATATCTT
GTGGAAAGGACGAAACACC.

[0156] In some embodiments, the U6 promoter is hU6d60 and comprises a nucleotide sequence that is at least 90%, 91%, 92%, 93%, 94%, 95%, 96%, 97%, 98%, 99% or 100% identical to the sequence of SEQ ID NO: 9002:

GAGGGCCTATTTCCCATGATTCCTTCATATTTGCATATACGATACAAGGC
TGTTAGAGAGATAATTGGAATTAATTTGACGTTTGCAGTTTTAAAATTAT
GTTTTAAAATGGACTATCATATGCTTACCGTAACTTGAAAGTATTTCGAT
TTCTTGGCTTTATATATCTTGTGGAAAGGACGAAACACC.

[0157] In some embodiments, the U6 promoter is hU6d90 and comprises a nucleotide sequence that is at least 90%, 91%, 92%, 93%, 94%, 95%, 96%, 97%, 98%, 99% or 100% identical to the sequence of SEQ ID NO: 9003:

GAGGGCCTATTTCCCATGATTCCTTCATATTTGCATATACGATACAAGGC
TGTTAGAGAGATAATATTATGTTTTAAAATGGACTATCATATGCTTACCG
TAACTTGAAAGTATTTCGATTTCTTGGCTTTATATATCTTGTGGAAAGGA
CGAAACACC.

[0158] In some embodiments, the U6 promoter is hU6d120 and comprises a nucleotide sequence that is at least 90%, 91%, 92%, 93%, 94%, 95%, 96%, 97%, 98%, 99% or 100% identical to the sequence of SEQ ID NO: 9004.

GAGGGCCTATTTCCCATGATTCCTTCATATTTGCATATACGATACAAGGC
GGACTATCATATGCTTACCGTAACTTGAAAGTATTTCGATTTCTTGGCTT
TATATATCTTGTGGAAAGGACGAAACACC.

[0159] In some embodiments, the 7SK promoter is a 7SK2 promoter and comprises a nucleotide sequence that is at least 90%, 91%, 92%, 93%, 94%, 95%, 96%, 97%, 98%, 99% or 100% identical to the sequence of SEQ ID NO: 706:

CTGCAGTATTTAGCATGCCCCACCCATCTGCAAGGCATTCTGGATAGTGT
CAAAACAGCCGGAAATCAAGTCCGTTTATCTCAAACTTTAGCATTTTGGG
AATAAATGATATTTGCTATGCTGGTTAAATTAGATTTTAGTTAAATTTCC
TGCTGAAGCTCTAGTACGATAAGCAACTTGACCTAAGTGTAAAGTTGAGA
CTTCCTTCAGGTTTATATAGCTTGTGCGCCGCTTGGGTACCTC.

[0160] In some embodiments, the 7SK promoter is a variant of the 7SK2 promoter. In some embodiments, the variant of the 7SK2 promoter comprises alternative nucleotides as compared to the sequence of SEQ ID NO: 706. In some embodiments, the variant of the 7SK2 promoter e.g., comprises fewer nucleotides as compared to the 243 nucleotides of SEQ ID NO: 706. In some embodiments, the variant of the 7SK2 promoter has fewer nucleotides in the nucleosome binding sequence of the 7SK2 promoter of SEQ ID NO: 706. In some embodiments, the variant of the 7SK2 promoter lacks all of or at least a portion of (e.g., at least 5, 10, 15, 20, 25, or 30 nucleotides) the nucleotides corresponding to nucleotides 95-124 of SEQ ID NO: 706. In some embodiments, the variant of the 7SK2 promoter lacks all of or at least a portion of (e.g., at least 5, 10, 15, 20, 25, 30, 35, 40, 45, 50, 55, or 60 nucleotides) the nucleotides corresponding to nucleotides 81-140 of SEQ ID NO: 706. In some embodiments, the variant of the 7SK2 promoter lacks all of or at least a portion of (e.g., at least 10, 20, 30, 40, 50, 60, 65, 70, 75, 80, 85 or 90 nucleotides) the nucleotides corresponding to nucleotides 67-156 of SEQ ID NO: 706. In some embodiments, the variant of the 7SK2 promoter lacks all of or at least a portion of (e.g., at least 10, 20, 30, 40, 50, 60, 70, 80, 90, 100, 110, or 120 nucleotides) the nucleotides corresponding to nucleotides 52-171 of SEQ ID NO: 706. In some embodiments, the variant of the 7SK2 promoter comprises 123-213 nucleotides. In some embodiments, the variant of the 7SK2 promoter comprises 213 nucleotides. In some embodiments, the variant of the 7SK2 promoter comprises 183 nucleotides. In some embodiments, the variant of the 7SK2 promoter comprises 153 nucleotides. In some embodiments, the variant of the 7SK2 promoter comprises 123 nucleotides.

[0161] In some embodiments, the 7SK promoter is 7SKd30 and comprises a nucleotide sequence that is at least 90%, 91%, 92%, 93%, 94%, 95%, 96%, 97%, 98%, 99% or 100% identical to the sequence of SEQ ID NO: 9006:

CTGCAGTATTTAGCATGCCCCACCCATCTGCAAGGCATTCTGGATAGTGT
CAAAACAGCCGGAAATCAAGTCCGTTTATCTCAAACTTTAGCATTTAAAT
TAGATTTTAGTTAAATTTCCTGCTGAAGCTCTAGTACGATAAGCAACTTG
ACCTAAGTGTAAAGTTGAGACTTCCTTCAGGTTTATATAGCTTGTGCGCC
GCTTGGGTACCTC.

[0162] In some embodiments, the 7SK promoter is 7SKd60 and comprises a nucleotide sequence that is at least 90%, 91%, 92%, 93%, 94%, 95%, 96%, 97%, 98%, 99% or 100% identical to the sequence of SEQ ID NO: 9007:

CTGCAGTATTTAGCATGCCCCACCCATCTGCAAGGCATTCTGGATAGTGT
CAAAACAGCCGGAAATCAAGTCCGTTTATCTTAAATTTCCTGCTGAAGCT
CTAGTACGATAAGCAACTTGACCTAAGTGTAAAGTTGAGACTTCCTTCAG
GTTTATATAGCTTGTGCGCCGCTTGGGTACCTC.

[0163] In some embodiments, the 7SK promoter is 7SKd90 and comprises a nucleotide sequence that is at least 90%, 91%, 92%, 93%, 94%, 95%, 96%, 97%, 98%, 99% or 100% identical to the sequence of SEQ ID NO: 9008:

CTGCAGTATTTAGCATGCCCCACCCATCTGCAAGGCATTCTGGATAGTGT
CAAAACAGCCGGAAATAGCTCTAGTACGATAAGCAACTTGACCTAAGTGT
AAAGTTGAGACTTCCTTCAGGTTTATATAGCTTGTGCGCCGCTTGGGTAC
CTC.

[0164] In some embodiments, the 7SK promoter is 7SKd120 and comprises a nucleotide sequence that is at least 90%, 91%, 92%, 93%, 94%, 95%, 96%, 97%, 98%, 99% or 100% identical to the sequence of SEQ ID NO: 9009:

[0165] CTGCAGTATTTAGCATGCCCCACCCATCTGCAAGGCATTCTGGATAGTGTCAG CAACTTGACCTAAGTGTAAAGTTGAGACTTCCTTCAGGTTTATATAGCTTGTGCGCCGCTT GGGTACCTC. In some embodiments, the H1 promoter is a H1m or mH1 promoter and comprises a nucleotide sequence that is at least 90%, 91%, 92%, 93%, 94%, 95%, 96%, 97%, 98%, 99% or 100% identical to the sequence of SEQ ID NO: 707:

AATATTTGCATGTCGCTATGTGTTCTGGGAAATCACCATAAACGTGAAAT
GTCTTTGGATTTGGGAATCTTATAAGTTCTGTATGAGACCACTCTTTCC
C.

[0166] In some embodiments, the promoter is an M 11 promoter and comprises a nucleotide sequence that is at least 90%, 91%, 92%, 93%, 94%, 95%, 96%, 97%, 98%, 99% or 100% identical to the sequence of SEQ ID NO: 708:

ATATTTAGCATGTCGCTATGTGTTCTGGGAAACTTGACCTAAGTGTAAA
GTTGAGATTTCCTTCAGGTTTATATAGTTCTGTATGAGACCACTCTTTC
CC.

[0167] In some embodiments, the vector comprises multiple inverted terminal repeats (ITRs). These ITRs may be of an AAV1, AAV2, AAV3, AAV4, AAV5, AAV6, AAV7, AAV8, or AAV9 serotype. In some embodiments, the ITRs are of an AAV2 serotype. In some embodiments, the 5′ ITR comprises a sequence that is at least 80%, 85%, 90%, 91%, 92%, 93%, 94%, 95%, 96%, 97%, 98%, 99%, or 100% identical to the sequence of SEQ ID NO: 709:

GGCCACTCCCTCTCTGCGCGCTCGCTCGCTCACTGAGGCCGGGCGACCA
AAGGTCGCCCGACGCCCGGGCTTTGCCCGGGCGGCCTCAGTGAGCGAGC
GAGCGCGCAGAGAGGGAGTGGCCAACTCCATCACTAGGGGTTCCT.

[0168] In some embodiments, the 5′ ITR comprises a sequence that is at least 80%, 85%, 90%, 91%, 92%, 93%, 94%, 95%, 96%, 97%, 98%, 99%, or 100% identical to the sequence of SEQ ID NO: 6:

CGGCCACTCCCTCTCTGCGCGCTCGCTCGCTCACTGAGGCCGGGCGACC
AAAGGTCGCCCGACGCCCGGGCTTTGCCCGGGCGGCCTCAGTGAGCGAG
CGAGCGCGCAGAGAGGGAGTGGCCAACTCCATCACTAGGGGTTCCT.

[0169] In some embodiments, the 3′ ITR comprises a sequence that is at least 80%, 85%, 90%, 91%, 92%, 93%, 94%, 95%, 96%, 97%, 98%, 99%, or 100% identical to the sequence of SEQ ID NO: 710:

AGGAACCCCTAGTGATGGAGTTGGCCACTCCCTCTCTGCGCGCTCGCTC
GCTCACTGAGGCCGGGCGACCAAAGGTCGCCCGACGCCCGGGCTTTGCC
CGGGCGGCCTCAGTGAGCGAGCGAGCGCGCAGAGAGGGA.

[0170] In some embodiments, the 3′ ITR comprises a sequence that is at least 80%, 85%, 90%, 91%, 92%, 93%, 94%, 95%, 96%, 97%, 98%, 99%, or 100% identical to the sequence of SEQ ID NO: 7:

AGGAACCCCTAGTGATGGAGTTGGCCACTCCCTCTCTGCGCGCTCGCTC
GCTCACTGAGGCCGGGCGACCAAAGGTCGCCCGACGCCCGGGCTTTGCC
CGGGCGGCCTCAGTGAGCGAGCGAGCGCGCAGAGAGGGAA.

[0171] In some embodiments, a vector comprising a single nucleic acid molecule encoding 1) two or more guide RNA comprising any one or more of the spacer sequences of Table 1A and Table 1B; and 2) a SaCas9 (for any one or more of SEQ ID Nos: 1000-3081) or SluCas9 (for any one or more of SEQ ID NO: 4000-5226) is provided. In particular embodiments, if the two or more guide RNAs target the same exon. In particular embodiments, the two or more guide RNAs each target a different site in the same exon. In some embodiments, the vector is an AAV vector. In some embodiments, the AAV vector is administered to a subject to treat DMD. In some embodiments, only one vector is needed due to the use of a particular guide sequence that is useful in the context of SaCas9 or SluCas9.

[0172] In some embodiments, the vector comprises a nucleic acid encoding a Cas9 protein (e.g., an SaCas9 or SluCas9 protein) and further comprises a nucleic acid encoding one or more single guide RNA(s). In some embodiments, the nucleic acid encoding the Cas9 protein is under the control of a CK8e promoter. In some embodiments, the nucleic acid encoding the guide RNA sequence is under the control of a hU6c promoter. In some embodiments, the vector is AAV9.

[0173] In some embodiments, the vector comprises multiple nucleic acids encoding more than one guide RNA. In some embodiments, the vector comprises two nucleic acids encoding two different guide RNA sequences.

[0174] In some embodiments, the vector comprises a nucleic acid encoding a Cas9 protein (e.g., an SaCas9 protein or SluCas9 protein), a nucleic acid encoding a first guide RNA, and a nucleic acid encoding a second guide RNA. In some embodiments, the vector does not comprise a nucleic acid encoding more than two guide RNAs. In some embodiments, the nucleic acid encoding the first guide RNA is the same as the nucleic acid encoding the second guide RNA. In some embodiments, the nucleic acid encoding the first guide RNA is different from the nucleic acid encoding the second guide RNA. In some embodiments, the vector comprises a single nucleic acid molecule, wherein the single nucleic acid molecule comprises a nucleic acid encoding a Cas9 protein, a nucleic acid encoding a first guide RNA, and a nucleic acid that is the reverse complement to the coding sequence for the second guide RNA. In some embodiments, the vector comprises a single nucleic acid molecule, wherein the single nucleic acid molecule comprises a nucleic acid encoding a Cas9 protein, a nucleic acid that is the reverse complement to the coding sequence for the first guide RNA, and a nucleic acid that is the reverse complement to the coding sequence for the second guide RNA. In some embodiments, the nucleic acid encoding a Cas9 protein (e.g., an SaCas9 or SluCas9 protein) is under the control of the CK8e promoter. In some embodiments, the first guide is under the control of the hU6c promoter and the second guide is under the control of the hU6c promoter. In some embodiments, the first guide is under the control of the 7SK2 promoter, and the second guide is under the control of the H1m promoter. In some embodiments, the first guide is under the control of the H1m promoter, and the second guide is under the control of the 7SK2 promoter. In some embodiments, the first guide is under the control of the hU6c promoter, and the second guide is under the control of the H1m promoter. In some embodiments, the first guide is under the control of the H1m promoter, and the second guide is under the control of the hU6c promoter. In some embodiments, the nucleic acid encoding the Cas9 protein is: a) between the nucleic acids encoding the guide RNAs, b) between the nucleic acids that are the reverse complement to the coding sequences for the guide RNAs, c) between the nucleic acid encoding the first guide RNA and the nucleic acid that is the reverse complement to the coding sequence for the second guide RNA, d) between the nucleic acid encoding the second guide RNA and the nucleic acid that is the reverse complement to the coding sequence for the first guide RNA, e) 5′ to the nucleic acids encoding the guide RNAs, f) 5′ to the nucleic acids that are the reverse complements to the coding sequences for the guide RNAs, g) 5′ to a nucleic acid encoding one of the guide RNAs and 5′ to a nucleic acid that is the reverse complement to the coding sequence for the other guide RNA, h) 3′ to the nucleic acids encoding the guide RNAs, i) 3′ to the nucleic acids that are the reverse complements to the coding sequences for the guide RNAs, or j) 3′ to a nucleic acid encoding one of the guide RNAs and 3′ to a nucleic acid that is the reverse complement to the coding sequence for the other guide RNA. In some embodiments, any of the vectors disclosed herein is AAV9. In preferred embodiments, the AAV9 vector is less than 5 kb from ITR to ITR in size, inclusive of both ITRs. In particular embodiments, the AAV9 vector is less than 4.9 kb from ITR to ITR in size, inclusive of both ITRs. In further embodiments, the AAV9 vector is less than 4.85 kb from ITR to ITR in size, inclusive of both ITRs. In further embodiments, the AAV9 vector is less than 4.8 kb from ITR to ITR in size, inclusive of both ITRs. In further embodiments, the AAV9 vector is less than 4.75 kb from ITR to ITR in size, inclusive of both ITRs. In further embodiments, the AAV9 vector is less than 4.7 kb from ITR to ITR in size, inclusive of both ITRs. In some embodiments, the vector is between 3.9-5 kb, 4-5 kb, 4.2-5 kb, 4.4-5 kb, 4.6-5 kb, 4.7-5 kb, 3.9-4.9 kb, 4.2-4.9 kb, 4.4-4.9 kb, 4.7-4.9 kb, 3.9-4.85 kb, 4.2-4.85 kb, 4.4-4.85 kb, 4.6-4.85 kb, 4.7-4.85 kb, 4.7-4.9 kb, 3.9-4.8 kb, 4.2-4.8 kb, 4.4-4.8 kb or 4.6-4.8 kb from ITR to ITR in size, inclusive of both ITRs. In some embodiments, the vector is between 4.4-4.85 kb from ITR to ITR in size, inclusive of both ITRs. In some embodiments, the vector is an AAV9 vector.

[0175] In some embodiments, any of the vectors disclosed herein comprises a nucleic acid encoding at least a first guide RNA and a second guide RNA. In some embodiments, the nucleic acid comprises a spacer-encoding sequence for the first guide RNA, a scaffold-encoding sequence for the first guide RNA, a spacer-encoding sequence for the second guide RNA, and a scaffold-encoding sequence of the second guide RNA. In some embodiments, the spacer-encoding sequence (e.g., encoding any of the spacer sequences disclosed herein) for the first guide RNA is identical to the spacer-encoding sequence for the second guide RNA. In some embodiments, the spacer-encoding sequence (e.g., encoding any of the spacer sequences disclosed herein) for the first guide RNA is different from the spacer-encoding sequence for the second guide RNA. In some embodiments, the scaffold-encoding sequence for the first guide RNA is identical to the scaffold-encoding sequence for the second guide RNA. In some embodiments, the scaffold-encoding sequence for the first guide RNA is different from the scaffold-encoding sequence for the nucleic acid encoding the second guide RNA. In some embodiments, the scaffold-encoding sequence for the first guide RNA comprises a sequence selected from the group consisting of SEQ ID Nos: 500-504 (for SaCas9) and 601 or 900-917 (for SluCas9), and the scaffold-encoding sequence for the second guide RNA comprises a different sequence selected from the group consisting of SEQ ID Nos: 500-504 (for SaCas9) and 601 or 900-917 (for SluCas9). In some embodiments, the scaffold-encoding sequence for the first guide RNA comprises the sequence of SEQ ID NO: 500, and the scaffold-encoding sequence for the second guide RNA comprises the sequence of SEQ ID NO: 501. In some embodiments, the scaffold-encoding sequence for the first guide RNA comprises the sequence of SEQ ID NO: 500, and the scaffold-encoding sequence for the second guide RNA comprises the sequence of SEQ ID NO: 502. In some embodiments, the scaffold-encoding sequence for the first guide RNA comprises the sequence of SEQ ID NO: 500, and the scaffold-encoding sequence for the second guide RNA comprises the sequence of SEQ ID NO: 503. In some embodiments, the scaffold-encoding sequence for the first guide RNA comprises the sequence of SEQ ID NO: 500, and the scaffold-encoding sequence for the second guide RNA comprises the sequence of SEQ ID NO: 504. In some embodiments, the scaffold-encoding sequence for the first guide RNA comprises the sequence of SEQ ID NO: 501, and the scaffold-encoding sequence for the second guide RNA comprises the sequence of SEQ ID NO: 502. In some embodiments, the scaffold-encoding sequence for the first guide RNA comprises the sequence of SEQ ID NO: 501, and the scaffold-encoding sequence for the second guide RNA comprises the sequence of SEQ ID NO: 503. In some embodiments, the scaffold-encoding sequence for the first guide RNA comprises the sequence of SEQ ID NO: 501, and the scaffold-encoding sequence for the second guide RNA comprises the sequence of SEQ ID NO: 504. In some embodiments, the scaffold-encoding sequence for the first guide RNA comprises the sequence of SEQ ID NO: 502, and the scaffold-encoding sequence for the second guide RNA comprises the sequence of SEQ ID NO: 503. In some embodiments, the scaffold-encoding sequence for the first guide RNA comprises the sequence of SEQ ID NO: 502, and the scaffold-encoding sequence for the second guide RNA comprises the sequence of SEQ ID NO: 504. In some embodiments, the scaffold-encoding sequence for the first guide RNA comprises the sequence of SEQ ID NO: 503, and the scaffold-encoding sequence for the second guide RNA comprises the sequence of SEQ ID NO: 504. In particular embodiments, the scaffold-encoding sequence for the first guide RNA comprises the sequence of SEQ ID NO: 504, and the scaffold-encoding sequence for the second guide RNA comprises the sequence of SEQ ID NO: 504. In some embodiments, the scaffold-encoding sequence for the first guide RNA comprises the sequence of SEQ ID NO: 600, and the scaffold-encoding sequence for the second guide RNA comprises the sequence of SEQ ID NO: 900. In some embodiments, the scaffold-encoding sequence for the first guide RNA comprises the sequence of SEQ ID NO: 600, and the scaffold-encoding sequence for the second guide RNA comprises the sequence of SEQ ID NO: 901. In some embodiments, the scaffold-encoding sequence for the first guide RNA comprises the sequence of SEQ ID NO: 600, and the scaffold-encoding sequence for the second guide RNA comprises the sequence of SEQ ID NO: 902. In some embodiments, the scaffold-encoding sequence for the first guide RNA comprises the sequence of SEQ ID NO: 600, and the scaffold-encoding sequence for the second guide RNA comprises the sequence of SEQ ID NO: 903. In some embodiments, the scaffold-encoding sequence for the first guide RNA comprises the sequence of SEQ ID NO: 600, and the scaffold-encoding sequence for the second guide RNA comprises the sequence of SEQ ID NO: 904. In some embodiments, the scaffold-encoding sequence for the first guide RNA comprises the sequence of SEQ ID NO: 600, and the scaffold-encoding sequence for the second guide RNA comprises the sequence of SEQ ID NO: 905. In some embodiments, the scaffold-encoding sequence for the first guide RNA comprises the sequence of SEQ ID NO: 600, and the scaffold-encoding sequence for the second guide RNA comprises the sequence of SEQ ID NO: 906. In some embodiments, the scaffold-encoding sequence for the first guide RNA comprises the sequence of SEQ ID NO: 600, and the scaffold-encoding sequence for the second guide RNA comprises the sequence of SEQ ID NO: 907. In some embodiments, the scaffold-encoding sequence for the first guide RNA comprises the sequence of SEQ ID NO: 600, and the scaffold-encoding sequence for the second guide RNA comprises the sequence of SEQ ID NO: 908. In some embodiments, the scaffold-encoding sequence for the first guide RNA comprises the sequence of SEQ ID NO: 600, and the scaffold-encoding sequence for the second guide RNA comprises the sequence of SEQ ID NO: 909. In some embodiments, the scaffold-encoding sequence for the first guide RNA comprises the sequence of SEQ ID NO: 600, and the scaffold-encoding sequence for the second guide RNA comprises the sequence of SEQ ID NO: 910. In some embodiments, the scaffold-encoding sequence for the first guide RNA comprises the sequence of SEQ ID NO: 600, and the scaffold-encoding sequence for the second guide RNA comprises the sequence of SEQ ID NO: 911. In some embodiments, the scaffold-encoding sequence for the first guide RNA comprises the sequence of SEQ ID NO: 600, and the scaffold-encoding sequence for the second guide RNA comprises the sequence of SEQ ID NO: 912. In some embodiments, the scaffold-encoding sequence for the first guide RNA comprises the sequence of SEQ ID NO: 600, and the scaffold-encoding sequence for the second guide RNA comprises the sequence of SEQ ID NO: 913. In some embodiments, the scaffold-encoding sequence for the first guide RNA comprises the sequence of SEQ ID NO: 600, and the scaffold-encoding sequence for the second guide RNA comprises the sequence of SEQ ID NO: 914. In some embodiments, the scaffold-encoding sequence for the first guide RNA comprises the sequence of SEQ ID NO: 600, and the scaffold-encoding sequence for the second guide RNA comprises the sequence of SEQ ID NO: 915. In some embodiments, the scaffold-encoding sequence for the first guide RNA comprises the sequence of SEQ ID NO: 600, and the scaffold-encoding sequence for the second guide RNA comprises the sequence of SEQ ID NO: 916. In some embodiments, the scaffold-encoding sequence for the first guide RNA comprises the sequence of SEQ ID NO: 600, and the scaffold-encoding sequence for the second guide RNA comprises the sequence of SEQ ID NO: 917. In some embodiments, the scaffold-encoding sequence for the first guide RNA comprises the sequence of SEQ ID NO: 901, and the scaffold-encoding sequence for the second guide RNA comprises the sequence of SEQ ID NO: 902. In some embodiments, the scaffold-encoding sequence for the first guide RNA comprises the sequence of SEQ ID NO: 901, and the scaffold-encoding sequence for the second guide RNA comprises the sequence of SEQ ID NO: 903. In some embodiments, the scaffold-encoding sequence for the first guide RNA comprises the sequence of SEQ ID NO: 901, and the scaffold-encoding sequence for the second guide RNA comprises the sequence of SEQ ID NO: 904. In some embodiments, the scaffold-encoding sequence for the first guide RNA comprises the sequence of SEQ ID NO: 901, and the scaffold-encoding sequence for the second guide RNA comprises the sequence of SEQ ID NO: 905. In some embodiments, the scaffold-encoding sequence for the first guide RNA comprises the sequence of SEQ ID NO: 901, and the scaffold-encoding sequence for the second guide RNA comprises the sequence of SEQ ID NO: 906. In some embodiments, the scaffold-encoding sequence for the first guide RNA comprises the sequence of SEQ ID NO: 901, and the scaffold-encoding sequence for the second guide RNA comprises the sequence of SEQ ID NO: 907. In some embodiments, the scaffold-encoding sequence for the first guide RNA comprises the sequence of SEQ ID NO: 901, and the scaffold-encoding sequence for the second guide RNA comprises the sequence of SEQ ID NO: 908. In some embodiments, the scaffold-encoding sequence for the first guide RNA comprises the sequence of SEQ ID NO: 901, and the scaffold-encoding sequence for the second guide RNA comprises the sequence of SEQ ID NO: 909. In some embodiments, the scaffold-encoding sequence for the first guide RNA comprises the sequence of SEQ ID NO: 901, and the scaffold-encoding sequence for the second guide RNA comprises the sequence of SEQ ID NO: 910. In some embodiments, the scaffold-encoding sequence for the first guide RNA comprises the sequence of SEQ ID NO: 901, and the scaffold-encoding sequence for the second guide RNA comprises the sequence of SEQ ID NO: 911. In some embodiments, the scaffold-encoding sequence for the first guide RNA comprises the sequence of SEQ ID NO: 901, and the scaffold-encoding sequence for the second guide RNA comprises the sequence of SEQ ID NO: 912. In some embodiments, the scaffold-encoding sequence for the first guide RNA comprises the sequence of SEQ ID NO: 901, and the scaffold-encoding sequence for the second guide RNA comprises the sequence of SEQ ID NO: 913. In some embodiments, the scaffold-encoding sequence for the first guide RNA comprises the sequence of SEQ ID NO: 901, and the scaffold-encoding sequence for the second guide RNA comprises the sequence of SEQ ID NO: 914. In some embodiments, the scaffold-encoding sequence for the first guide RNA comprises the sequence of SEQ ID NO: 901, and the scaffold-encoding sequence for the second guide RNA comprises the sequence of SEQ ID NO: 915. In some embodiments, the scaffold-encoding sequence for the first guide RNA comprises the sequence of SEQ ID NO: 901, and the scaffold-encoding sequence for the second guide RNA comprises the sequence of SEQ ID NO: 916. In some embodiments, the scaffold-encoding sequence for the first guide RNA comprises the sequence of SEQ ID NO: 901, and the scaffold-encoding sequence for the second guide RNA comprises the sequence of SEQ ID NO: 917. In particular embodiments, the scaffold-encoding sequence for the first guide RNA comprises the sequence of SEQ ID NO: 901, and the scaffold-encoding sequence for the second guide RNA comprises the sequence of SEQ ID NO: 901. In some embodiments, the spacer encoding sequence for the first guide RNA is the same as the spacer-encoding sequence in the second guide RNA, and the scaffold-encoding sequence for the first guide RNA is different from the scaffold-encoding sequence in the nucleic acid encoding the second guide RNA.

[0176] In some embodiments, the AAV vector is in a particular configuration. Some examples of these AAV vector configurations are provided herein, and the order of elements in these exemplary vectors are referenced in a 5′ to 3′ manner with respect to the plus strand. For these configurations, it should be understood that the recited elements may not be directly contiguous, and that one or more nucleotides or one or more additional elements may be present between the recited elements. However, in some embodiments, it is possible that no nucleotides or no additional elements are present between the recited elements. Also, unless otherwise stated, “a promoter for expression of element X” means that the promoter is oriented in a manner to facilitate expression of the recited element X. In addition, unless otherwise stated, references to an “sgRNA scaffold sequence” or “a guide RNA scaffold sequence” are synonymous with “a nucleotide sequence/nucleic acid encoding an sgRNA scaffold sequence” or “a nucleotide sequence/nucleic acid encoding a guide RNA scaffold sequence.” In some embodiments, the disclosure provides for a nucleic acid encoding an SaCas9 (e.g., an SaCas9-KKH) or SluCas9. In some embodiments, the nucleic acid encodes for one or more nuclear localization signals (e.g., the SV40 NLS and/or the c-Myc NLS) on the C-terminus of the encoded SaCas9 or SluCas9. In some embodiments, the nucleic acid encodes for one or more NLSs (e.g., the SV40 NLS and/or the c-Myc NLS) on the C-terminus of the encoded SaCas9 or SluCas9, and the nucleic acid does not encode for an NLS on the N-terminus of the encoded SaCas9 or SluCas9. In some embodiments, the nucleic acid encodes for one or more nuclear localization signals (e.g., the SV40 NLS and/or the c-Myc NLS) on the N-terminus of the encoded SaCas9 or SluCas9. In some embodiments, the nucleic acid encodes for one or more NLSs (e.g., the SV40 NLS and/or the c-Myc NLS) on the N-terminus of the encoded SaCas9 or SluCas9, and the nucleic acid does not encode for an NLS on the C-terminus of the encoded SaCas9 or SluCas9. In some embodiments, the nucleic acid encodes for one or more nuclear localization signals (e.g., the SV40 NLS and/or the c-Myc NLS) on the C-terminus of the encoded SaCas9 or SluCas9 and also encodes for one or more NLSs on the N-terminus of the encoded SaCas9 or SluCas9 (e.g., the SV40 NLS and/or the c-Myc NLS). In some embodiments, the nucleic acid encodes one NLS. In some embodiments, the nucleic acid encodes two NLSs. In some embodiments, the nucleic acid encodes three NLSs. The one, two, or three NLS may all be C-terminal, N-terminal, or any combination of C- and N-terminal. The NLS may be fused/attached directly to the C- or N-terminus or to another NLS, or may be fused/attached indirectly attached through a linker. In some embodiments, an additional domain may be: a) fused to the N- or C-terminus of the Cas protein (e.g., a Cas9 protein), b) fused to the N-terminus of an NLS fused to the N-terminus of a Cas protein, or c) fused to the C-terminus of an NLS fused to the C-terminus of a Cas protein, with or without a linker. In some embodiments, an NLS is fused to the N- and/or C-terminus of the Cas protein by means of a linker. In some embodiments, an NLS is fused to the N-terminus of an N-terminally-fused NLS on a Cas protein by means of a linker, and/or an NLS is fused to the C-terminus of a C-terminally fused NLS on a Cas protein by means of a linker. In some embodiments, the linker is GSVD (SEQ ID NO: 550) or GSGS (SEQ ID NO: 551). In some embodiments, the Cas protein comprises a c-Myc NLS fused to the N-terminus of the Cas protein (or to an N-terminally-fused NLS on the Cas protein), optionally by means of a linker. In some embodiments, the Cas protein comprises an SV40 NLS fused to the C-terminus of the Cas protein (or to a C-terminally-fused NLS on the Cas protein), optionally by means of a linker. In some embodiments, the Cas protein comprises a nucleoplasmin NLS fused to the C-terminus of the Cas protein (or to a C-terminally-fused NLS on the Cas protein), optionally by means of a linker. In some embodiments, the Cas protein comprises: a) a c-Myc NLS fused to the N-terminus of the Cas protein, optionally by means of a linker, b) an SV40 NLS fused to the C-terminus of the Cas protein, optionally by means of a linker, and c) a nucleoplasmin NLS fused to the C-terminus of the SV40 NLS, optionally by means of a linker. In some embodiments, the Cas protein comprises: a) a c-Myc NLS fused to the N-terminus of the Cas protein, optionally by means of a linker, b) a nucleoplasmin NLS fused to the C-terminus of the Cas protein, optionally by means of a linker, and c) an SV40 NLS fused to the C-terminus of the nucleoplasmin NLS, optionally by means of a linker. In some embodiments, a c-myc NLS is fused to the N-terminus of the Cas and an SV40 NLS and/or nucleoplasmin NLS is fused to the C-terminus of the Cas. In some embodiments, a c-myc NLS is fused to the N-terminus of the Cas (e.g., by means of a linker such as GSVD), an SV40 NLS is fused to the C-terminus of the Cas (e.g., by means of a linker such as GSGS), and a nucleoplasmin NLS is fused to the C-terminus of the SV-40 NLS (e.g., by means of a linker such as GSGS).

[0177] In some embodiments, the AAV vector comprises from 5′ to 3′ with respect to the plus strand: the reverse complement of a first sgRNA scaffold sequence, the reverse complement of a nucleic acid encoding a first sgRNA guide sequence, the reverse complement of a promoter for expression of the nucleic acid encoding the first sgRNA, a promoter for expression of a nucleic acid encoding Cas9 (e.g., CK8e), a nucleic acid encoding Cas9, a polyadenylation sequence, a promoter for expression of a second sgRNA, a second sgRNA guide sequence, and a second sgRNA scaffold sequence. In some embodiments, the first sgRNA is associated with weaker expression than the second sgRNA when compared individually in a sgRNA expression assay, e.g., in an assay in which each guide is separately assessed (i.e., not in the same construct) using the same promoter, same concentration of genetic material/vector/RNP in substantially the same conditions (e.g., time, pH, temperature, buffer conditions). In some embodiments the promoter for expression of the nucleic acid encoding the first sgRNA is any of the hU6c promoters disclosed herein. In some embodiments the promoter for expression of the nucleic acid encoding the first sgRNA comprises SEQ ID NO: 705. In some embodiments the promoter for expression of the nucleic acid encoding the first sgRNA comprises SEQ ID NO: 9001. In some embodiments the promoter for expression of the nucleic acid encoding the first sgRNA comprises SEQ ID NO: 9002. In some embodiments the promoter for expression of the nucleic acid encoding the first sgRNA comprises SEQ ID NO: 9003. In some embodiments the promoter for expression of the nucleic acid encoding the first sgRNA comprises SEQ ID NO: 9004. In some embodiments the promoter for expression of the nucleic acid encoding the first sgRNA is any of the 7SK2 promoters disclosed herein. In some embodiments the promoter for expression of the nucleic acid encoding the first sgRNA comprises SEQ ID NO: 705. In some embodiments the promoter for expression of the nucleic acid encoding the first sgRNA comprises SEQ ID NO: 9006. In some embodiments the promoter for expression of the nucleic acid encoding the first sgRNA comprises SEQ ID NO: 9007. In some embodiments the promoter for expression of the nucleic acid encoding the first sgRNA comprises SEQ ID NO: 9008. In some embodiments the promoter for expression of the nucleic acid encoding the first sgRNA comprises SEQ ID NO: 9009. In some embodiments the promoter for expression of the nucleic acid encoding the second sgRNA is any of the hU6c promoters disclosed herein. In some embodiments the promoter for expression of the nucleic acid encoding the second sgRNA comprises SEQ ID NO: 705. In some embodiments the promoter for expression of the nucleic acid encoding the second sgRNA comprises SEQ ID NO: 9001. In some embodiments the promoter for expression of the nucleic acid encoding the second sgRNA comprises SEQ ID NO: 9002. In some embodiments the promoter for expression of the nucleic acid encoding the second sgRNA comprises SEQ ID NO: 9003. In some embodiments the promoter for expression of the nucleic acid encoding the second sgRNA comprises SEQ ID NO: 9004. In some embodiments the promoter for expression of the nucleic acid encoding the second sgRNA is any of the 7SK2 promoters disclosed herein. In some embodiments the promoter for expression of the nucleic acid encoding the second sgRNA comprises SEQ ID NO: 705. In some embodiments the promoter for expression of the nucleic acid encoding the second sgRNA comprises SEQ ID NO: 9006. In some embodiments the promoter for expression of the nucleic acid encoding the second sgRNA comprises SEQ ID NO: 9007. In some embodiments the promoter for expression of the nucleic acid encoding the second sgRNA comprises SEQ ID NO: 9008. In some embodiments the promoter for expression of the nucleic acid encoding the second sgRNA comprises SEQ ID NO: 9009. In some embodiments the promoter for expression of the nucleic acid encoding the second sgRNA is any of the H1m promoters disclosed herein. In some embodiments, the promoter for SaCas9 is the CK8e promoter. In some embodiments, the nucleic acid sequence encoding SaCas9 is fused to a nucleic acid sequence encoding a nuclear localization sequence (NLS). In some embodiments, the nucleic acid sequence encoding SaCas9 is fused to two nucleic acid sequences each encoding a nuclear localization sequence (NLS). In some embodiments, the nucleic acid sequence encoding SaCas9 is fused to three nucleic acid sequences each encoding a nuclear localization sequence (NLS). In some embodiments, the one or more NLSs is an SV40 NLS. In some embodiments, the one or more NLSs is a c-Myc NLS. In some embodiments, the one or more NLSs is a nucleoplasmin NLS. In some embodiments, the NLS is fused to the SaCas9 with a linker.

[0178] In some embodiments, the AAV vector comprises from 5′ to 3′ with respect to the plus strand: the reverse complement of a first sgRNA scaffold sequence, the reverse complement of a nucleic acid encoding a first sgRNA guide sequence, the reverse complement of an hU6c promoter for expression of the nucleic acid encoding the first sgRNA, a promoter for expression of a nucleic acid encoding Cas9 (e.g., CK8e), a nucleic acid encoding Cas9, a polyadenylation sequence, an hU6c promoter for expression of a second sgRNA, a second sgRNA guide sequence, and a second sgRNA scaffold sequence. In some embodiments, the first sgRNA and the second sgRNA are selected from Table 1A (for SaCas9) or Table 1B (for SluCas9). In some embodiments, the nucleic acid sequence encoding Cas9 is fused to a nucleic acid sequence encoding a nuclear localization sequence (NLS). In some embodiments, the nucleic acid sequence encoding Cas9 is fused to two nucleic acid sequences each encoding a nuclear localization sequence (NLS). In some embodiments, the nucleic acid sequence encoding Cas9 is fused to three nucleic acid sequences each encoding a nuclear localization sequence (NLS). In some embodiments, the one or more NLSs is an SV40 NLS. In some embodiments, the one or more NLSs is a c-Myc NLS. In some embodiments, the NLS is fused to the Cas9 with a linker.

[0179] In some embodiments, the AAV vector comprises from 5′ to 3′ with respect to the plus strand: the reverse complement of a first sgRNA scaffold sequence, the reverse complement of a nucleic acid encoding a first sgRNA guide sequence, the reverse complement of an hU6c promoter for expression of the nucleic acid encoding the first sgRNA, a promoter for expression of a nucleic acid encoding Cas9 (e.g., CK8e), a nucleic acid encoding Cas9, a polyadenylation sequence, an 7SK promoter for expression of a second sgRNA, a second sgRNA guide sequence, and a second sgRNA scaffold sequence. In some embodiments, the first sgRNA and the second sgRNA are selected from Table 1A (for SaCas9) or Table 1B (for SluCas9). In some embodiments, the nucleic acid sequence encoding Cas9 is fused to a nucleic acid sequence encoding a nuclear localization sequence (NLS). In some embodiments, the nucleic acid sequence encoding Cas9 is fused to two nucleic acid sequences each encoding a nuclear localization sequence (NLS). In some embodiments, the nucleic acid sequence encoding Cas9 is fused to three nucleic acid sequences each encoding a nuclear localization sequence (NLS). In some embodiments, the one or more NLSs is an SV40 NLS. In some embodiments, the one or more NLSs is a c-Myc NLS. In some embodiments, the NLS is fused to the Cas9 with a linker.

[0180] In some embodiments, the AAV vector comprises from 5′ to 3′ with respect to the plus strand: the reverse complement of a first sgRNA scaffold sequence, the reverse complement of a nucleic acid encoding a first sgRNA guide sequence, the reverse complement of an hU6c promoter for expression of the nucleic acid encoding the first sgRNA, a promoter for expression of a nucleic acid encoding Cas9 (e.g., CK8e), a nucleic acid encoding Cas9, a polyadenylation sequence, an H1m promoter for expression of a second sgRNA, a second sgRNA guide sequence, and a second sgRNA scaffold sequence. In some embodiments, the first sgRNA and the second sgRNA are selected from Table 1A (for SaCas9) or Table 1B (for SluCas9). In some embodiments, the nucleic acid sequence encoding Cas9 is fused to a nucleic acid sequence encoding a nuclear localization sequence (NLS). In some embodiments, the nucleic acid sequence encoding Cas9 is fused to two nucleic acid sequences each encoding a nuclear localization sequence (NLS). In some embodiments, the nucleic acid sequence encoding Cas9 is fused to three nucleic acid sequences each encoding a nuclear localization sequence (NLS). In some embodiments, the one or more NLSs is an SV40 NLS. In some embodiments, the one or more NLSs is a c-Myc NLS. In some embodiments, the NLS is fused to the Cas9 with a linker.

[0181] In some embodiments, the AAV vector comprises from 5′ to 3′ with respect to the plus strand: the reverse complement of a first sgRNA scaffold sequence, the reverse complement of a nucleic acid encoding a first sgRNA guide sequence, the reverse complement of an 7SK promoter for expression of the nucleic acid encoding the first sgRNA, a promoter for expression of a nucleic acid encoding Cas9 (e.g., CK8e), a nucleic acid encoding Cas9, a polyadenylation sequence, an H1m promoter for expression of a second sgRNA, a second sgRNA guide sequence, and a second sgRNA scaffold sequence. In some embodiments, the first sgRNA and the second sgRNA are selected from Table 1A (for SaCas9) or Table 1B (for SluCas9). In some embodiments, the nucleic acid sequence encoding Cas9 is fused to a nucleic acid sequence encoding a nuclear localization sequence (NLS). In some embodiments, the nucleic acid sequence encoding Cas9 is fused to two nucleic acid sequences each encoding a nuclear localization sequence (NLS). In some embodiments, the nucleic acid sequence encoding Cas9 is fused to three nucleic acid sequences each encoding a nuclear localization sequence (NLS). In some embodiments, the one or more NLSs is an SV40 NLS. In some embodiments, the one or more NLSs is a c-Myc NLS. In some embodiments, the NLS is fused to the Cas9 with a linker.

[0182] In some embodiments, the disclosure provides for a composition comprising at least two nucleic acids. In some embodiments, the composition comprises at least two nucleic acid molecules, wherein the first nucleic acid molecule comprises a sequence encoding any of the endonucleases disclosed herein (e.g., a SaCas9, SluCas9, or sRGN), wherein the second nucleic acid molecule encodes a first guide RNA and a second guide RNA, wherein the first guide RNA and the second guide RNA are not the same sequence, and wherein the second nucleic acid molecule does not encode an endonuclease. In some embodiments, the first nucleic acid molecule also encodes a copy of the first guide RNA and a copy of the second guide RNA. In some embodiments, the first nucleic acid molecule does not encode any guide RNAs. In some embodiments, the second nucleic acid molecule encodes two copies of the first guide RNA and two copies of the second guide RNA. In some embodiments, the second nucleic molecule encodes two copies of the first guide RNA, and one copy of the second guide RNA. In some embodiments, the second nucleic acid molecule encodes one copy of the first guide RNA, and two copies of the second guide RNA. In some embodiments, the second nucleic acid molecule comprises two copies of the first guide RNA, and three copies of the second guide RNA. In some embodiments, the second nucleic acid molecule comprises three copies of the first guide RNA, and two copies of the second guide RNA. In some embodiments, the second nucleic acid does not encode a Cas protein. In some embodiments, the second nucleic acid molecule encodes three copies of the first guide RNA and three copies of the second guide RNA. In some embodiments, the first nucleic acid molecule comprises from 5′ to 3′ with respect to the plus strand: the reverse complement of a first guide RNA scaffold sequence, the reverse complement of a nucleotide sequence encoding the first guide RNA sequence, the reverse complement of a promoter for expression of the nucleotide sequence encoding the first guide RNA sequence, a promoter for expression of a nucleotide sequence encoding the endonuclease, a nucleotide sequence encoding an endonuclease, a polyadenylation sequence, a promoter for expression of the second guide RNA in the same direction as the promoter for the endonuclease, the second guide RNA sequence, and a second guide RNA scaffold sequence. In some embodiments, the promoter for expression of the nucleotide sequence encoding the first guide RNA sequence in the first nucleic acid molecule is a U6 promoter and the promoter for expression of the nucleotide sequence encoding the second guide RNA in the first nucleic acid molecule is a U6 promoter.

[0183] In some embodiments, the AAV vector comprises from 5′ to 3′ with respect to the plus strand: a promoter for expression of a nucleic acid encoding a first sgRNA, a nucleic acid encoding the first sgRNA guide sequence, the first sgRNA scaffold sequence, a promoter for expression of Cas9 (e.g., CK8e), a nucleic acid encoding Cas9, a polyadenylation sequence, a promoter for expression of a second sgRNA, the second sgRNA guide sequence, and a second sgRNA scaffold sequence. See FIG. 1 at “Design 1”.

[0184] In some embodiments, the AAV vector comprises from 5′ to 3′ with respect to the plus strand: the reverse complement of a first sgRNA scaffold sequence, the reverse complement of a nucleic acid encoding a first sgRNA guide sequence, the reverse complement of a promoter for expression of the nucleic acid encoding the first sgRNA, a promoter for expression of a nucleic acid encoding Cas9 (e.g., CK8e), a nucleic acid encoding Cas9, a polyadenylation sequence, a promoter for expression of a second sgRNA, a second sgRNA guide sequence, and a second sgRNA scaffold sequence. See FIG. 1 at “Design 2”.

[0185] In some embodiments, the AAV vector comprises from 5′ to 3′ with respect to the plus strand: a promoter for expression of a nucleic acid encoding a first sgRNA, a nucleic acid encoding the first sgRNA guide sequence, a first sgRNA scaffold sequence, a promoter for expression of a second sgRNA, a second sgRNA guide sequence, and a second sgRNA scaffold sequence, a promoter for Cas9 (e.g., CK8e), a nucleic acid encoding Cas9, and a polyadenylation sequence. See FIG. 1 at “Design 3”.

[0186] In some embodiments, the AAV vector comprises from 5′ to 3′ with respect to the plus strand: a promoter for expression of a nucleic acid encoding Cas9 (e.g., CK8e), a nucleic acid encoding Cas9, a polyadenylation sequence, a promoter for expression of the nucleic acid encoding a first guide RNA, a nucleic acid encoding the first sgRNA guide sequence, a first sgRNA scaffold sequence, a promoter for expression of the second sgRNA, a second sgRNA guide sequence, and a second sgRNA scaffold sequence. See FIG. 1 at “Design 4”.

[0187] In some embodiments, the first nucleic acid molecule is in a first vector (e.g., AAV9), and the second nucleic acid is in a separate second vector. In some embodiments, the first vector is AAV9. In some embodiments, the second vector is AAV9. In preferred embodiments, the AAV9 vector is less than 5 kb from ITR to ITR in size, inclusive of both ITRs. In particular embodiments, the AAV9 vector is less than 4.9 kb from ITR to ITR in size, inclusive of both ITRs. In further embodiments, the AAV9 vector is less than 4.85 kb from ITR to ITR in size, inclusive of both ITRs. In further embodiments, the AAV9 vector is less than 4.8 kb from ITR to ITR in size, inclusive of both ITRs. In further embodiments, the AAV9 vector is less than 4.75 kb from ITR to ITR in size, inclusive of both ITRs. In further embodiments, the AAV9 vector is less than 4.7 kb from ITR to ITR in size, inclusive of both ITRs. In some embodiments, the second vector comprises from 5′ to 3′ with respect to the plus strand: a promoter for expression of a first copy of a first guide RNA (e.g., a U6 promoter), a first copy of a nucleotide sequence encoding a first guide RNA, a first copy of a nucleotide sequence encoding a first guide RNA scaffold, a promoter for expression of a second copy of the first guide RNA (e.g., a H1 promoter), a second copy of the nucleotide sequence encoding the first guide RNA, a second copy of the nucleotide sequence encoding the first guide RNA scaffold, a promoter for expression of a second guide RNA (e.g., a 7SK promoter), a nucleotide sequence encoding a second guide RNA, and a nucleotide sequence encoding a second guide RNA scaffold. In some embodiments, the second vector comprises from 5′ to 3′ with respect to the plus strand: a promoter for expression of a first guide RNA (e.g., a U6 promoter), a nucleotide sequence encoding a first guide RNA, a nucleotide sequence encoding a first guide RNA scaffold, a promoter for expression of a second guide RNA (e.g., a 7SK promoter), a nucleotide sequence encoding a second guide RNA, and a nucleotide sequence encoding a second guide RNA scaffold. In some embodiments, the second vector comprises a stuffer sequence (e.g., a 3′UTR desmin sequence) between the nucleotide sequence encoding the first guide scaffold sequence and the promoter for expression of the second guide sequence. In some embodiments, the second vector comprises from 5′ to 3′ with respect to the plus strand: the reverse complement of a nucleotide sequence encoding a scaffold for a first guide RNA, the reverse complement of a nucleotide sequence encoding a first guide RNA, the reverse complement of a promoter for expression of the first guide RNA (e.g., a U6c promoter), a promoter for expression of a second guide RNA (e.g., a U6c promoter), a nucleotide sequence encoding a second guide RNA, and a nucleotide sequence encoding a second guide RNA scaffold. In some embodiments, the second vector comprises a stuffer sequence (e.g., a 3′UTR desmin sequence) between the reverse complement of the promoter for expression of the first guide RNA and the promoter for expression of the second guide RNA. In some embodiments, the second vector comprises from 5′ to 3′ with respect to the plus strand: the reverse complement of a nucleotide sequence encoding a first copy of a first guide RNA scaffold, the reverse complement of a nucleotide sequence encoding a first copy of the first guide RNA, the reverse complement of a promoter for expression of the first copy of the first guide RNA (e.g., a 7SK2 promoter), the reverse complement of a second copy of the nucleotide sequence encoding the first guide RNA scaffold, the reverse complement of a second copy of the nucleotide sequence encoding the first guide RNA, the reverse complement of a promoter for expression of the second copy of the nucleotide sequence encoding the first guide RNA (e.g., a hU6c promoter), a promoter for expression of a first copy of a second guide RNA (e.g., a hU6c promoter), a first copy of a nucleotide sequence encoding a second guide RNA, a first copy of a nucleotide sequence encoding a second guide RNA scaffold, a promoter for expression of a second copy of the second guide RNA (e.g., a 7Sk2 promoter), a second copy of the nucleotide sequence encoding the second guide RNA, and a second copy of the nucleotide sequence encoding the second guide RNA scaffold. In some embodiments, the second vector comprises a stuffer sequence (e.g., a 3′UTR desmin sequence) between the reverse complement of the promoter for expression of the second copy of the first guide RNA and the promoter for expression of the first copy of the second guide RNA. In some embodiments, the second vector comprises from 5′ to 3′ with respect to the plus strand: the reverse complement of a nucleotide sequence encoding a first copy of a first guide RNA scaffold, the reverse complement of a first copy of a nucleotide sequence encoding the first guide RNA, the reverse complement of a promoter for expression of the first copy of the first guide RNA (e.g., a 7SK2 promoter), the reverse complement of a first copy of a nucleotide sequence encoding a second guide RNA scaffold, the reverse complement of a nucleotide sequence encoding the first copy of the second guide RNA, the reverse complement of a promoter for expression of the first copy of the second guide RNA (e.g., a hU6c promoter), a promoter for expression of a second copy of the second guide RNA (e.g., a hU6c promoter), a second copy of the nucleotide sequence encoding the second guide RNA, a second copy of the nucleotide sequence encoding the second guide RNA scaffold, a promoter for expression of a second copy of the first guide RNA (e.g., a 7SK2 promoter), a second copy of the nucleotide sequence encoding the first guide RNA, and a second copy of the nucleotide sequence encoding the first guide RNA scaffold. In some embodiments, the second vector comprises a stuffer sequence (e.g., a 3′UTR desmin sequence) between the reverse complement of the promoter for expression of the first copy of the second guide RNA and the promoter for expression of the second copy of the first guide RNA. In some embodiments, the second vector comprises from 5′ to 3′ with respect to the plus strand: the reverse complement of a nucleotide sequence encoding a first guide RNA scaffold, the reverse complement of a nucleotide sequence encoding a first guide RNA, the reverse complement of a promoter for expression of a first guide RNA (e.g., a hU6c promoter), a promoter for expression of a second guide RNA (e.g., a hU6c promoter), a nucleotide sequence encoding a second guide RNA, and a nucleotide sequence encoding a second guide RNA scaffold. In some embodiments, the second vector comprises a stuffer sequence (e.g., a 3′UTR desmin sequence) between the reverse complement of the promoter for expression of the first guide RNA and the promoter for expression of the second guide RNA. In particular embodiments, the first guide RNA is different from the second guide RNA. In some embodiments, the first guide RNA comprises a sequence of Table 1A (for SaCas9) or Table 1B (for SluCas9) and the second guide RNA comprises a different sequence from Table 1A (for SaCas9) or Table 1B (for SluCas9).

[0188] In some embodiments, if the composition comprises one or more nucleic acids encoding an RNA-targeted endonuclease and one or more guide RNAs, the one or more nucleic acids are designed such that they express the one or more guide RNAs at an equivalent or higher level (e.g., a greater number of expressed transgene copies) as compared to the expression level of the RNA-targeted endonuclease. In some embodiments, the one or more nucleic acids are designed such that they express (e.g., on average in 100 cells) the one or more guide RNAs at least a 1.1, 1.2, 1.3, 1.4, or 1.5 times higher level (e.g., a greater number of expressed transgene copies) as compared to the expression level of the RNA-targeted endonuclease. In some embodiments, the one or more nucleic acids are designed such that they express the one or more guide RNAs at 1.01-1.5, 1.01-1.4, 1.01-1.3, 1.01-1.2, 1.01-1.1, 1.1-2.0, 1.1-1.8, 1.1-1.6, 1.1-1.4, 1.1-1.3, 1.2-2.0, 1.2-1.8, 1.2-1.6, 1.2-1.4, 1.4-2.0, 1.4-1.8, 1.4-1.6, 1.6-2.0, 1.6-1.8, or 1.8-2.0 times higher level (e.g., a greater number of expressed transgene copies) as compared to the expression level of the RNA-targeted endonuclease. In some embodiments, the one or more guide RNAs are designed to express a higher level than the RNA-targeted endonuclease by: a) utilizing one or more regulatory elements (e.g., promoters or enhancers) that express the one or more guide RNAs at a higher level as compared to the regulatory elements (e.g., promoters or enhancers) for expression of the RNA-targeted endonuclease; and/or b) expressing more copies of one or more of the guide RNAs as compared to the number of copies of the RNA-targeted endonuclease (e.g., 2× or 3× as many copies of the nucleotide sequences encoding the one or more guide RNAs as compared to the number of copies of the nucleotide sequences encoding the RNA-targeted endonuclease). For example, in some embodiments, the composition comprises multiple nucleic acid molecules (e.g., in multiple vectors), wherein for every nucleotide sequence encoding an RNA-targeted endonuclease in the nucleic acid molecules in the composition, there are two or three copies of the nucleotide sequence encoding the guide RNA in the nucleic acid molecules in the composition. In some embodiments, the composition comprises a first guide RNA and a second guide RNA, wherein the first guide RNA and the second guide RNA are not the same (e.g., any of the guide RNA pairs disclosed herein), and for every nucleotide sequence encoding an RNA-targeted endonuclease in the nucleic acid molecules in the composition, there are two or three copies of the nucleotide sequence encoding the first guide RNA and/or the second guide RNA.

### Endonucleases

[0189] In some embodiments, any of the nucleic acids disclosed herein encodes an RNA-targeted endonuclease. In some embodiments, the RNA-targeted endonuclease has cleavase activity, which can also be referred to as double-strand endonuclease activity. In some embodiments, the RNA-targeted endonuclease comprises a Cas nuclease. Examples of Cas9 nucleases include those of the type II CRISPR systems.

[0190] In some embodiments, the Cas protein comprises an amino acid sequence that is at least 80%, 85%, 90%, 91%, 92%, 93%, 94%, 95%, 96%, 97%, 98%, 99% or 100% identical to the sequence of SEQ ID NO: 8 (designated herein as SpCas9):

[sequence omitted]

[0191] In some embodiments, the nucleic acid encoding SaCas9 encodes an SaCas9 comprising an amino acid sequence that is at least 80%, 85%, 90%, 91%, 92%, 93%, 94%, 95%, 96%, 97%, 98%, 99% or 100% identical to the sequence of SEQ ID NO: 711:

KRNYILGLDIGITSVGYGIIDYETRDVIDAGVRLFKEANVENNEGRRSKRGARRLKRRRRHRI
QRVKKLLFDYNLLTDHSELSGINPYEARVKGLSQKLSEEEFSAALLHLAKRRGVHNVNEVEE
DTGNELSTKEQISRNSKALEEKYVAELQLERLKKDGEVRGSINRFKTSDYVKEAKQLLKVQK
AYHQLDQSFIDTYIDLLETRRTYYEGPGEGSPFGWKDIKEWYEMLMGHCTYFPEELRSVKYA
YNADLYNALNDLNNLVITRDENEKLEYYEKFQIIENVFKQKKKPTLKQIAKEILVNEEDIKGY
RVTSTGKPEFTNLKVYHDIKDITARKEIIENAELLDQIAKILTIYQSSEDIQEELTNLNSELTQEE
IEQISNLKGYTGTHNLSLKAINLILDELWHTNDNQIAIFNRLKLVPKKVDLSQQKEIPTTLVDD
FILSPVVKRSFIQSIKVINAIIKKYGLPNDIIIELAREKNSKDAQKMINEMQKRNRQTNERIEEIIR
TTGKENAKYLIEKIKLHDMQEGKCLYSLEAIPLEDLLNNPFNYEVDHIIPRSVSFDNSFNNKVL
VKQEENSKKGNRTPFQYLSSSDSKISYETFKKHILNLAKGKGRISKTKKEYLLEERDINRFSVQ
KDFINRNLVDTRYATRGLMNLLRSYFRVNNLDVKVKSINGGFTSFLRRKWKFKKERNKGYK
HHAEDALIIANADFIFKEWKKLDKAKKVMENQMFEEKQAESMPEIETEQEYKEIFITPHQIKHI
KDFKDYKYSHRVDKKPNRELINDTLYSTRKDDKGNTLIVNNLNGLYDKDNDKLKKLINKSP
EKLLMYHHDPQTYQKLKLIMEQYGDEKNPLYKYYEETGNYLTKYSKKDNGPVIKKIKYYGN
KLNAHLDITDDYPNSRNKVVKLSLKPYRFDVYLDNGVYKFVTVKNLDVIKKENYYEVNSKC
YEEAKKLKKISNQAEFIASFYNNDLIKINGELYRVIGVNNDLLNRIEVNMIDITYREYLENMN
DKRPPRIIKTIASKTQSIKKYSTDILGNLYEVKSKKHPQIIKKG.

[0192] In some embodiments, the nucleic acid encoding SaCas9 comprises the nucleic acid of SEQ ID NO: 9014:

[0193] AAGCGCAATTACATCCTGGGCCTGGATATCGGCATCACCTCCGTGGGCTACG GCATCATCGACTATGAGACACGGGATGTGATCGACGCCGGCGTGAGACTGTTCAAGGAG GCCAACGTGGAGAACAATGAGGGCCGGCGGAGCAAGAGGGGAGCAAGGCGCCTGAAGC GGAGAAGGCGCCACAGAATCCAGAGAGTGAAGAAGCTGCTGTTCGATTACAACCTGCTG ACCGACCACTCCGAGCTGTCTGGCATCAATCCTTATGAGGCCCGGGTGAAGGGCCTGTCC CAGAAGCTGTCTGAGGAGGAGTTTTCTGCCGCCCTGCTGCACCTGGCAAAGAGGAGAGG CGTGCACAACGTGAATGAGGTGGAGGAGGACACCGGCAACGAGCTGAGCACAAAGGAG CAGATCAGCCGCAATTCCAAGGCCCTGGAGGAGAAGTATGTGGCCGAGCTGCAGCTGGA GCGGCTGAAGAAGGATGGCGAGGTGAGGGGCTCCATCAATCGCTTCAAGACCTCTGACT ACGTGAAGGAGGCCAAGCAGCTGCTGAAGGTGCAGAAGGCCTACCACCAGCTGGATCAG AGCTTTATCGATACATATATCGACCTGCTGGAGACCAGGCGCACATACTATGAGGGACC AGGAGAGGGCTCCCCCTTCGGCTGGAAGGACATCAAGGAGTGGTACGAGATGCTGATGG GCCACTGCACCTATTTTCCAGAGGAGCTGAGATCCGTGAAGTACGCCTATAACGCCGATC TGTACAACGCCCTGAATGACCTGAACAACCTGGTCATCACCAGGGATGAGAACGAGAAG CTGGAGTACTATGAGAAGTTCCAGATCATCGAGAACGTGTTCAAGCAGAAGAAGAAGCC TACACTGAAGCAGATCGCCAAGGAGATCCTGGTGAACGAGGAGGACATCAAGGGCTACC GCGTGACCAGCACAGGCAAGCCAGAGTTCACCAATCTGAAGGTGTATCACGATATCAAG GACATCACAGCCCGGAAGGAGATCATCGAGAACGCCGAGCTGCTGGATCAGATCGCCAA GATCCTGACCATCTATCAGAGCTCCGAGGACATCCAGGAGGAGCTGACCAACCTGAATA GCGAGCTGACACAGGAGGAGATCGAGCAGATCAGCAATCTGAAGGGCTACACCGGCAC ACACAACCTGTCCCTGAAGGCCATCAATCTGATCCTGGATGAGCTGTGGCACACAAACG ACAATCAGATCGCCATCTTTAACAGGCTGAAGCTGGTGCCAAAGAAGGTGGACCTGAGC CAGCAGAAGGAGATCCCAACCACACTGGTGGACGATTTCATCCTGTCCCCCGTGGTGAA GCGGAGCTTCATCCAGAGCATCAAAGTGATCAACGCCATCATCAAGAAGTACGGCCTGC CCAATGATATCATCATCGAGCTGGCCAGGGAGAAGAACTCTAAGGACGCCCAGAAGATG ATCAATGAGATGCAGAAGAGGAACCGCCAGACCAATGAGCGGATCGAGGAGATCATCA GAACCACAGGCAAGGAGAACGCCAAGTACCTGATCGAGAAGATCAAGCTGCACGATAT GCAGGAGGGCAAGTGTCTGTATAGCCTGGAGGCCATCCCTCTGGAGGACCTGCTGAACA ATCCATTCAACTACGAGGTGGATCACATCATCCCCCGGAGCGTGAGCTTCGACAATTCCT TTAACAATAAGGTGCTGGTGAAGCAGGAGGAGAACTCTAAGAAGGGCAATAGGACCCCT TTCCAGTACCTGTCTAGCTCCGATTCTAAGATCAGCTACGAGACCTTCAAGAAGCACATC CTGAATCTGGCCAAGGGCAAGGGCCGCATCTCTAAGACCAAGAAGGAGTACCTGCTGGA GGAGCGGGACATCAACAGATTCAGCGTGCAGAAGGACTTCATCAACCGGAATCTGGTGG ACACCAGATACGCCACACGCGGCCTGATGAATCTGCTGCGGTCCTATTTCAGAGTGAACA ATCTGGATGTGAAGGTGAAGAGCATCAACGGCGGCTTCACCTCCTTTCTGCGGAGAAAG TGGAAGTTTAAGAAGGAGAGAAACAAGGGCTATAAGCACCACGCCGAGGATGCCCTGAT CATCGCCAATGCCGACTTCATCTTTAAGGAGTGGAAGAAGCTGGACAAGGCCAAGAAAG TGATGGAGAACCAGATGTTCGAGGAGAAGCAGGCCGAGAGCATGCCCGAGATCGAGAC CGAGCAGGAGTACAAGGAGATTTTCATCACACCTCACCAGATCAAGCACATCAAGGACT TCAAGGACTACAAGTATTCCCACAGGGTGGATAAGAAGCCCAACCGCGAGCTGATCAAT GACACCCTGTATTCTACAAGGAAGGACGATAAGGGCAATACCCTGATCGTGAACAATCT GAACGGCCTGTACGACAAGGATAATGACAAGCTGAAGAAGCTGATCAACAAGAGCCCC GAGAAGCTGCTGATGTACCACCACGATCCTCAGACATATCAGAAGCTGAAGCTGATCAT GGAGCAGTACGGCGACGAGAAGAACCCACTGTATAAGTACTATGAGGAGACCGGCAACT ACCTGACAAAGTATTCCAAGAAGGATAATGGCCCCGTGATCAAGAAGATCAAGTACTAT GGCAACAAGCTGAATGCCCACCTGGACATCACCGACGATTACCCCAACAGCCGGAATAA GGTGGTGAAGCTGAGCCTGAAGCCATACAGGTTCGACGTGTACCTGGACAACGGCGTGT ATAAGTTTGTGACAGTGAAGAATCTGGATGTGATCAAGAAGGAGAACTACTATGAAGTG AATAGCAAGTGCTACGAGGAGGCCAAGAAGCTGAAGAAGATCAGCAACCAGGCCGAGT TCATCGCCTCTTTTTACAACAATGACCTGATCAAGATCAATGGCGAGCTGTATAGAGTGA TCGGCGTGAACAATGATCTGCTGAACCGCATCGAAGTGAATATGATCGACATCACCTACC GGGAGTATCTGGAGAACATGAATGATAAGAGGCCCCCTCGCATCATCAAGACCATCGCC TCTAAGACACAGAGCATCAAGAAGTACTCTACAGACATCCTGGGCAACCTGTATGAGGT GAAGAGCAAGAAGCACCCTCAGATCATCAAGAAGGGC. In some embodiments comprising a nucleic acid encoding SaCas9, the SaCas9 comprises an amino acid sequence of SEQ ID NO: 711.

[0194] In some embodiments, the SaCas9 is a variant of the amino acid sequence of SEQ ID NO: 711. In some embodiments, the SaCas9 comprises an amino acid other than an E at the position corresponding to position 781 of SEQ ID NO: 711. In some embodiments, the SaCas9 comprises an amino acid other than an N at the position corresponding to position 967 of SEQ ID NO: 711. In some embodiments, the SaCas9 comprises an amino acid other than an R at the position corresponding to position 1014 of SEQ ID NO: 711. In some embodiments, the SaCas9 comprises a K at the position corresponding to position 781 of SEQ ID NO: 711. In some embodiments, the SaCas9 comprises a K at the position corresponding to position 967 of SEQ ID NO: 711. In some embodiments, the SaCas9 comprises an H at the position corresponding to position 1014 of SEQ ID NO: 711. In some embodiments, the SaCas9 comprises an amino acid other than an E at the position corresponding to position 781 of SEQ ID NO: 711; an amino acid other than an N at the position corresponding to position 967 of SEQ ID NO: 711; and an amino acid other than an R at the position corresponding to position 1014 of SEQ ID NO: 711. In some embodiments, the SaCas9 comprises a K at the position corresponding to position 781 of SEQ ID NO: 711; a K at the position corresponding to position 967 of SEQ ID NO: 711; and an H at the position corresponding to position 1014 of SEQ ID NO: 711.

[0195] In some embodiments, the SaCas9 comprises an amino acid other than an R at the position corresponding to position 244 of SEQ ID NO: 711. In some embodiments, the SaCas9 comprises an amino acid other than an N at the position corresponding to position 412 of SEQ ID NO: 711. In some embodiments, the SaCas9 comprises an amino acid other than an N at the position corresponding to position 418 of SEQ ID NO: 711. In some embodiments, the SaCas9 comprises an amino acid other than an R at the position corresponding to position 653 of SEQ ID NO: 711. In some embodiments, the SaCas9 comprises an amino acid other than an R at the position corresponding to position 244 of SEQ ID NO: 711; an amino acid other than an N at the position corresponding to position 412 of SEQ ID NO: 711; an amino acid other than an N at the position corresponding to position 418 of SEQ ID NO: 711; and an amino acid other than an R at the position corresponding to position 653 of SEQ ID NO: 711. In some embodiments, the SaCas9 comprises an A at the position corresponding to position 244 of SEQ ID NO: 711. In some embodiments, the SaCas9 comprises an A at the position corresponding to position 412 of SEQ ID NO: 711. In some embodiments, the SaCas9 comprises an A at the position corresponding to position 418 of SEQ ID NO: 711. In some embodiments, the SaCas9 comprises an A at the position corresponding to position 653 of SEQ ID NO: 711. In some embodiments, the SaCas9 comprises an A at the position corresponding to position 244 of SEQ ID NO: 711; an A at the position corresponding to position 412 of SEQ ID NO: 711; an A at the position corresponding to position 418 of SEQ ID NO: 711; and an A at the position corresponding to position 653 of SEQ ID NO: 711.

[0196] In some embodiments, the SaCas9 comprises an amino acid other than an R at the position corresponding to position 244 of SEQ ID NO: 711; an amino acid other than an N at the position corresponding to position 412 of SEQ ID NO: 711; an amino acid other than an N at the position corresponding to position 418 of SEQ ID NO: 711; an amino acid other than an R at the position corresponding to position 653 of SEQ ID NO: 711; an amino acid other than an E at the position corresponding to position 781 of SEQ ID NO: 711; an amino acid other than an N at the position corresponding to position 967 of SEQ ID NO: 711; and an amino acid other than an R at the position corresponding to position 1014 of SEQ ID NO: 711. In some embodiments, the SaCas9 comprises an A at the position corresponding to position 244 of SEQ ID NO: 711; an A at the position corresponding to position 412 of SEQ ID NO: 711; an A at the position corresponding to position 418 of SEQ ID NO: 711; an A at the position corresponding to position 653 of SEQ ID NO: 711; a K at the position corresponding to position 781 of SEQ ID NO: 711; a K at the position corresponding to position 967 of SEQ ID NO: 711; and an H at the position corresponding to position 1014 of SEQ ID NO: 711.

[0197] In some embodiments, the SaCas9 comprises an amino acid sequence that is at least 80%, 85%, 90%, 91%, 92%, 93%, 94%, 95%, 96%, 97%, 98%, 99% or 100% identical to the sequence of SEQ ID NO: 715 (designated herein as SaCas9-KKH or SACAS9KKH):

KRNYILGLDIGITSVGYGIIDYETRDVIDAGVRLFKEANVENNEGRRSKRGARRLKRRRRHRI
QRVKKLLFDYNLLTDHSELSGINPYEARVKGLSQKLSEEEFSAALLHLAKRRGVHNVNEVEE
DTGNELSTKEQISRNSKALEEKYVAELQLERLKKDGEVRGSINRFKTSDYVKEAKQLLKVQK
AYHQLDQSFIDTYIDLLETRRTYYEGPGEGSPFGWKDIKEWYEMLMGHCTYFPEELRSVKYA
YNADLYNALNDLNNLVITRDENEKLEYYEKFQIIENVFKQKKKPTLKQIAKEILVNEEDIKGY
RVTSTGKPEFTNLKVYHDIKDITARKEIIENAELLDQIAKILTIYQSSEDIQEELTNLNSELTQEE
IEQISNLKGYTGTHNLSLKAINLILDELWHTNDNQIAIFNRLKLVPKKVDLSQQKEIPTTLVDD
FILSPVVKRSFIQSIKVINAIIKKYGLPNDIIIELAREKNSKDAQKMINEMQKRNRQTNERIEEIIR
TTGKENAKYLIEKIKLHDMQEGKCLYSLEAIPLEDLLNNPFNYEVDHIIPRSVSFDNSFNNKVL
VKQEENSKKGNRTPFQYLSSSDSKISYETFKKHILNLAKGKGRISKTKKEYLLEERDINRFSVQ
KDFINRNLVDTRYATRGLMNLLRSYFRVNNLDVKVKSINGGFTSFLRRKWKFKKERNKGYK
HHAEDALIIANADFIFKEWKKLDKAKKVMENQMFEEKQAESMPEIETEQEYKEIFITPHQIKHI
KDFKDYKYSHRVDKKPNRKLINDTLYSTRKDDKGNTLIVNNLNGLYDKDNDKLKKLINKSP
EKLLMYHHDPQTYQKLKLIMEQYGDEKNPLYKYYEETGNYLTKYSKKDNGPVIKKIKYYGN
KLNAHLDITDDYPNSRNKVVKLSLKPYRFDVYLDNGVYKFVTVKNLDVIKKENYYEVNSKC
YEEAKKLKKISNQAEFIASFYKNDLIKINGELYRVIGVNNDLLNRIEVNMIDITYREYLENMN
DKRPPHIIKTIASKTQSIKKYSTDILGNLYEVKSKKHPQIIKKG.

[0198] In some embodiments, the SaCas9 comprises an amino acid sequence that is at least 80%, 85%, 90%, 91%, 92%, 93%, 94%, 95%, 96%, 97%, 98%, 99% or 100% identical to the sequence of SEQ ID NO: 716 (designated herein as SaCas9-HF):

KRNYILGLDIGITSVGYGIIDYETRDVIDAGVRLFKEANVENNEGRRSKRGARRLKRRRRHRI
QRVKKLLFDYNLLTDHSELSGINPYEARVKGLSQKLSEEEFSAALLHLAKRRGVHNVNEVEE
DTGNELSTKEQISRNSKALEEKYVAELQLERLKKDGEVRGSINRFKTSDYVKEAKQLLKVQK
AYHQLDQSFIDTYIDLLETRRTYYEGPGEGSPFGWKDIKEWYEMLMGHCTYFPEELASVKYA
YNADLYNALNDLNNLVITRDENEKLEYYEKFQIIENVFKQKKKPTLKQIAKEILVNEEDIKGY
RVTSTGKPEFTNLKVYHDIKDITARKEIIENAELLDQIAKILTIYQSSEDIQEELTNLNSELTQEE
IEQISNLKGYTGTHNLSLKAINLILDELWHTNDAQIAIFARLKLVPKKVDLSQQKEIPTTLVDD
FILSPVVKRSFIQSIKVINAIIKKYGLPNDIIIELAREKNSKDAQKMINEMQKRNRQTNERIEEIIR
TTGKENAKYLIEKIKLHDMQEGKCLYSLEAIPLEDLLNNPFNYEVDHIIPRSVSFDNSFNNKVL
VKQEENSKKGNRTPFQYLSSSDSKISYETFKKHILNLAKGKGRISKTKKEYLLEERDINRFSVQ
KDFINRNLVDTRYATAGLMNLLRSYFRVNNLDVKVKSINGGFTSFLRRKWKFKKERNKGYK
HHAEDALIIANADFIFKEWKKLDKAKKVMENQMFEEKQAESMPEIETEQEYKEIFITPHQIKHI
KDFKDYKYSHRVDKKPNRELINDTLYSTRKDDKGNTLIVNNLNGLYDKDNDKLKKLINKSP
EKLLMYHHDPQTYQKLKLIMEQYGDEKNPLYKYYEETGNYLTKYSKKDNGPVIKKIKYYGN
KLNAHLDITDDYPNSRNKVVKLSLKPYRFDVYLDNGVYKFVTVKNLDVIKKENYYEVNSKC
YEEAKKLKKISNQAEFIASFYNNDLIKINGELYRVIGVNNDLLNRIEVNMIDITYREYLENMN
DKRPPRIIKTIASKTQSIKKYSTDILGNLYEVKSKKHPQIIKKG.

[0199] In some embodiments, the SaCas9 comprises an amino acid sequence that is at least 80%, 85%, 90%, 91%, 92%, 93%, 94%, 95%, 96%, 97%, 98%, 99% or 100% identical to the sequence of SEQ ID NO: 717 (designated herein as SaCas9-KKH-HF):

KRNYILGLDIGITSVGYGIIDYETRDVIDAGVRLFKEANVENNEGRRSKRGARRLKRRRRHRI
QRVKKLLFDYNLLTDHSELSGINPYEARVKGLSQKLSEEEFSAALLHLAKRRGVHNVNEVEE
DTGNELSTKEQISRNSKALEEKYVAELQLERLKKDGEVRGSINRFKTSDYVKEAKQLLKVQK
AYHQLDQSFIDTYIDLLETRRTYYEGPGEGSPFGWKDIKEWYEMLMGHCTYFPEELASVKYA
YNADLYNALNDLNNLVITRDENEKLEYYEKFQIIENVFKQKKKPTLKQIAKEILVNEEDIKGY
RVTSTGKPEFTNLKVYHDIKDITARKEIIENAELLDQIAKILTIYQSSEDIQEELTNLNSELTQEE
IEQISNLKGYTGTHNLSLKAINLILDELWHTNDAQIAIFARLKLVPKKVDLSQQKEIPTTLVDD
FILSPVVKRSFIQSIKVINAIIKKYGLPNDIIIELAREKNSKDAQKMINEMQKRNRQTNERIEEIIR
TTGKENAKYLIEKIKLHDMQEGKCLYSLEAIPLEDLLNNPFNYEVDHIIPRSVSFDNSFNNKVL
VKQEENSKKGNRTPFQYLSSSDSKISYETFKKHILNLAKGKGRISKTKKEYLLEERDINRFSVQ
KDFINRNLVDTRYATAGLMNLLRSYFRVNNLDVKVKSINGGFTSFLRRKWKFKKERNKGYK
HHAEDALIIANADFIFKEWKKLDKAKKVMENQMFEEKQAESMPEIETEQEYKEIFITPHQIKHI
KDFKDYKYSHRVDKKPNRKLINDTLYSTRKDDKGNTLIVNNLNGLYDKDNDKLKKLINKSP
EKLLMYHHDPQTYQKLKLIMEQYGDEKNPLYKYYEETGNYLTKYSKKDNGPVIKKIKYYGN
KLNAHLDITDDYPNSRNKVVKLSLKPYRFDVYLDNGVYKFVTVKNLDVIKKENYYEVNSKC
YEEAKKLKKISNQAEFIASFYKNDLIKINGELYRVIGVNNDLLNRIEVNMIDITYREYLENMN
DKRPPHIIKTIASKTQSIKKYSTDILGNLYEVKSKKHPQIIKKG.

[0200] In some embodiments, the nucleic acid encoding SluCas9 encodes a SluCas9 comprising an amino acid sequence that is at least 80%, 85%, 90%, 91%, 92%, 93%, 94%, 95%, 96%, 97%, 98%, 99% or 100% identical to the sequence of SEQ ID NO: 712:

NQKFILGLDIGITSVGYGLIDYETKNIIDAGVRLFPEANVENNEGRRSKRGSRRLKRRRIHRLE
RVKKLLEDYNLLDQSQIPQSTNPYAIRVKGLSEALSKDELVIALLHIAKRRGIHKIDVIDSNDD
VGNELSTKEQLNKNSKLLKDKFVCQIQLERMNEGQVRGEKNRFKTADIIKEIIQLLNVQKNFH
QLDENFINKYIELVEMRREYFEGPGKGSPYGWEGDPKAWYETLMGHCTYFPDELRSVKYAY
SADLFNALNDLNNLVIQRDGLSKLEYHEKYHIIENVFKQKKKPTLKQIANEINVNPEDIKGYRI
TKSGKPQFTEFKLYHDLKSVLFDQSILENEDVLDQIAEILTIYQDKDSIKSKLTELDILLNEEDK
ENIAQLTGYTGTHRLSLKCIRLVLEEQWYSSRNQMEIFTHLNIKPKKINLTAANKIPKAMIDEF
ILSPVVKRTFGQAINLINKIIEKYGVPEDIIIELARENNSKDKQKFINEMQKKNENTRKRINEIIG
KYGNQNAKRLVEKIRLHDEQEGKCLYSLESIPLEDLLNNPNHYEVDHIIPRSVSFDNSYHNKV
LVKQSENSKKSNLTPYQYFNSGKSKLSYNQFKQHILNLSKSQDRISKKKKEYLLEERDINKFE
VQKEFINRNLVDTRYATRELTNYLKAYFSANNMNVKVKTINGSFTDYLRKVWKFKKERNH
GYKHHAEDALIIANADFLFKENKKLKAVNSVLEKPEIETKQLDIQVDSEDNYSEMFIIPKQVQ
DIKDFRNFKYSHRVDKKPNRQLINDTLYSTRKKDNSTYIVQTIKDIYAKDNTTLKKQFDKSPE
KFLMYQHDPRTFEKLEVIMKQYANEKNPLAKYHEETGEYLTKYSKKNNGPIVKSLKYIGNK
LGSHLDVTHQFKSSTKKLVKLSIKPYRFDVYLTDKGYKFITISYLDVLKKDNYYYIPEQKYDK
LKLGKAIDKNAKFIASFYKNDLIKLDGEIYKIIGVNSDTRNMIELDLPDIRYKEYCELNNIKGEP
RIKKTIGKKVNSIEKLTTDVLGNVFTNTQYTKPQLLFKRGN.

[0201] In some embodiments, the SluCas9 is a variant of the amino acid sequence of SEQ ID NO: 712. In some embodiments, the SluCas9 comprises an amino acid other than an Q at the position corresponding to position 781 of SEQ ID NO: 712. In some embodiments, the SluCas9 comprises an amino acid other than an R at the position corresponding to position 1013 of SEQ ID NO: 712. In some embodiments, the SluCas9 comprises a K at the position corresponding to position 781 of SEQ ID NO: 712. In some embodiments, the SluCas9 comprises a K at the position corresponding to position 966 of SEQ ID NO: 712. In some embodiments, the SluCas9 comprises an H at the position corresponding to position 1013 of SEQ ID NO: 712. In some embodiments, the SluCas9 comprises an amino acid other than an Q at the position corresponding to position 781 of SEQ ID NO: 712; and an amino acid other than an R at the position corresponding to position 1013 of SEQ ID NO: 712. In some embodiments, the SluCas9 comprises a K at the position corresponding to position 781 of SEQ ID NO: 712; a K at the position corresponding to position 966 of SEQ ID NO: 712; and an H at the position corresponding to position 1013 of SEQ ID NO: 712.

[0202] In some embodiments, the SluCas9 comprises an amino acid other than an R at the position corresponding to position 246 of SEQ ID NO: 712. In some embodiments, the SluCas9 comprises an amino acid other than an N at the position corresponding to position 414 of SEQ ID NO: 712. In some embodiments, the SluCas9 comprises an amino acid other than a T at the position corresponding to position 420 of SEQ ID NO: 712. In some embodiments, the SluCas9 comprises an amino acid other than an R at the position corresponding to position 655 of SEQ ID NO: 712. In some embodiments, the SluCas9 comprises an amino acid other than an R at the position corresponding to position 246 of SEQ ID NO: 712; an amino acid other than an N at the position corresponding to position 414 of SEQ ID NO: 712; an amino acid other than a T at the position corresponding to position 420 of SEQ ID NO: 712; and an amino acid other than an R at the position corresponding to position 655 of SEQ ID NO: 712. In some embodiments, the SluCas9 comprises an A at the position corresponding to position 246 of SEQ ID NO: 712. In some embodiments, the SluCas9 comprises an A at the position corresponding to position 414 of SEQ ID NO: 712. In some embodiments, the SluCas9 comprises an A at the position corresponding to position 420 of SEQ ID NO: 712. In some embodiments, the SluCas9 comprises an A at the position corresponding to position 655 of SEQ ID NO: 712. In some embodiments, the SluCas9 comprises an A at the position corresponding to position 246 of SEQ ID NO: 712; an A at the position corresponding to position 414 of SEQ ID NO: 712; an A at the position corresponding to position 420 of SEQ ID NO: 712; and an A at the position corresponding to position 655 of SEQ ID NO: 712.

[0203] In some embodiments, the SluCas9 comprises an amino acid other than an R at the position corresponding to position 246 of SEQ ID NO: 712; an amino acid other than an N at the position corresponding to position 414 of SEQ ID NO: 712; an amino acid other than a T at the position corresponding to position 420 of SEQ ID NO: 712; an amino acid other than an R at the position corresponding to position 655 of SEQ ID NO: 712; an amino acid other than an Q at the position corresponding to position 781 of SEQ ID NO: 712; a K at the position corresponding to position 966 of SEQ ID NO: 712; and an amino acid other than an R at the position corresponding to position 1013 of SEQ ID NO: 712. In some embodiments, the SluCas9 comprises an A at the position corresponding to position 246 of SEQ ID NO: 712; an A at the position corresponding to position 414 of SEQ ID NO: 712; an A at the position corresponding to position 420 of SEQ ID NO: 712; an A at the position corresponding to position 655 of SEQ ID NO: 712; a K at the position corresponding to position 781 of SEQ ID NO: 712; a K at the position corresponding to position 966 of SEQ ID NO: 712; and an H at the position corresponding to position 1013 of SEQ ID NO: 712.

[0204] In some embodiments, the SluCas9 comprises an amino acid sequence that is at least 80%, 85%, 90%, 91%, 92%, 93%, 94%, 95%, 96%, 97%, 98%, 99% or 100% identical to the sequence of SEQ ID NO: 718 (designated herein as SluCas9-KH or SLUCAS9KH):

NQKFILGLDIGITSVGYGLIDYETKNIIDAGVRLFPEANVENNEGRRSKRGSRRLKRRRIHRLE
RVKKLLEDYNLLDQSQIPQSTNPYAIRVKGLSEALSKDELVIALLHIAKRRGIHKIDVIDSNDD
VGNELSTKEQLNKNSKLLKDKFVCQIQLERMNEGQVRGEKNRFKTADIIKEIIQLLNVQKNFH
QLDENFINKYIELVEMRREYFEGPGKGSPYGWEGDPKAWYETLMGHCTYFPDELRSVKYAY
SADLFNALNDLNNLVIQRDGLSKLEYHEKYHIIENVFKQKKKPTLKQIANEINVNPEDIKGYRI
TKSGKPQFTEFKLYHDLKSVLFDQSILENEDVLDQIAEILTIYQDKDSIKSKLTELDILLNEEDK
ENIAQLTGYTGTHRLSLKCIRLVLEEQWYSSRNQMEIFTHLNIKPKKINLTAANKIPKAMIDEF
ILSPVVKRTFGQAINLINKIIEKYGVPEDIIIELARENNSKDKQKFINEMQKKNENTRKRINEIIG
KYGNQNAKRLVEKIRLHDEQEGKCLYSLESIPLEDLLNNPNHYEVDHIIPRSVSFDNSYHNKV
LVKQSENSKKSNLTPYQYFNSGKSKLSYNQFKQHILNLSKSQDRISKKKKEYLLEERDINKFE
VQKEFINRNLVDTRYATRELTNYLKAYFSANNMNVKVKTINGSFTDYLRKVWKFKKERNH
GYKHHAEDALIIANADFLFKENKKLKAVNSVLEKPEIETKQLDIQVDSEDNYSEMFIIPKQVQ
DIKDFRNFKYSHRVDKKPNRKLINDTLYSTRKKDNSTYIVQTIKDIYAKDNTTLKKQFDKSPE
KFLMYQHDPRTFEKLEVIMKQYANEKNPLAKYHEETGEYLTKYSKKNNGPIVKSLKYIGNK
LGSHLDVTHQFKSSTKKLVKLSIKPYRFDVYLTDKGYKFITISYLDVLKKDNYYYIPEQKYDK
LKLGKAIDKNAKFIASFYKNDLIKLDGEIYKIIGVNSDTRNMIELDLPDIRYKEYCELNNIKGEP
HIKKTIGKKVNSIEKLTTDVLGNVFTNTQYTKPQLLFKRGN.

[0205] In some embodiments, the SluCas9 comprises an amino acid sequence that is at least 80%, 85%, 90%, 91%, 92%, 93%, 94%, 95%, 96%, 97%, 98%, 99% or 100% identical to the sequence of SEQ ID NO: 719 (designated herein as SluCas9-HF):

NQKFILGLDIGITSVGYGLIDYETKNIIDAGVRLFPEANVENNEGRRSKRGSRRLKRRRIHRLE
RVKKLLEDYNLLDQSQIPQSTNPYAIRVKGLSEALSKDELVIALLHIAKRRGIHKIDVIDSNDD
VGNELSTKEQLNKNSKLLKDKFVCQIQLERMNEGQVRGEKNRFKTADIIKEIIQLLNVQKNFH
QLDENFINKYIELVEMRREYFEGPGKGSPYGWEGDPKAWYETLMGHCTYFPDELASVKYAY
SADLFNALNDLNNLVIQRDGLSKLEYHEKYHIIENVFKQKKKPTLKQIANEINVNPEDIKGYRI
TKSGKPQFTEFKLYHDLKSVLFDQSILENEDVLDQIAEILTIYQDKDSIKSKLTELDILLNEEDK
ENIAQLTGYTGTHRLSLKCIRLVLEEQWYSSRAQMEIFAHLNIKPKKINLTAANKIPKAMIDEF
ILSPVVKRTFGQAINLINKIIEKYGVPEDIIIELARENNSKDKQKFINEMQKKNENTRKRINEIIG
KYGNQNAKRLVEKIRLHDEQEGKCLYSLESIPLEDLLNNPNHYEVDHIIPRSVSFDNSYHNKV
LVKQSENSKKSNLTPYQYFNSGKSKLSYNQFKQHILNLSKSQDRISKKKKEYLLEERDINKFE
VQKEFINRNLVDTRYATAELTNYLKAYFSANNMNVKVKTINGSFTDYLRKVWKFKKERNH
GYKHHAEDALIIANADFLFKENKKLKAVNSVLEKPEIETKQLDIQVDSEDNYSEMFIIPKQVQ
DIKDFRNFKYSHRVDKKPNRQLINDTLYSTRKKDNSTYIVQTIKDIYAKDNTTLKKQFDKSPE
KFLMYQHDPRTFEKLEVIMKQYANEKNPLAKYHEETGEYLTKYSKKNNGPIVKSLKYIGNK
LGSHLDVTHQFKSSTKKLVKLSIKPYRFDVYLTDKGYKFITISYLDVLKKDNYYYIPEQKYDK
LKLGKAIDKNAKFIASFYKNDLIKLDGEIYKIIGVNSDTRNMIELDLPDIRYKEYCELNNIKGEP
RIKKTIGKKVNSIEKLTTDVLGNVFTNTQYTKPQLLFKRGN.

[0206] In some embodiments, the SluCas9 comprises an amino acid sequence that is at least 80%, 85%, 90%, 91%, 92%, 93%, 94%, 95%, 96%, 97%, 98%, 99% or 100% identical to the sequence of SEQ ID NO: 720 (designated herein as SluCas9-HF-KH):

NQKFILGLDIGITSVGYGLIDYETKNIIDAGVRLFPEANVENNEGRRSKRGSRRLKRRRIHRLE
RVKKLLEDYNLLDQSQIPQSTNPYAIRVKGLSEALSKDELVIALLHIAKRRGIHKIDVIDSNDD
VGNELSTKEQLNKNSKLLKDKFVCQIQLERMNEGQVRGEKNRFKTADIIKEIIQLLNVQKNFH
QLDENFINKYIELVEMRREYFEGPGKGSPYGWEGDPKAWYETLMGHCTYFPDELASVKYAY
SADLFNALNDLNNLVIQRDGLSKLEYHEKYHIIENVFKQKKKPTLKQIANEINVNPEDIKGYRI
TKSGKPQFTEFKLYHDLKSVLFDQSILENEDVLDQIAEILTIYQDKDSIKSKLTELDILLNEEDK
ENIAQLTGYTGTHRLSLKCIRLVLEEQWYSSRAQMEIFAHLNIKPKKINLTAANKIPKAMIDEF
ILSPVVKRTFGQAINLINKIIEKYGVPEDIIIELARENNSKDKQKFINEMQKKNENTRKRINEIIG
KYGNQNAKRLVEKIRLHDEQEGKCLYSLESIPLEDLLNNPNHYEVDHIIPRSVSFDNSYHNKV
LVKQSENSKKSNLTPYQYFNSGKSKLSYNQFKQHILNLSKSQDRISKKKKEYLLEERDINKFE
VQKEFINRNLVDTRYATAELTNYLKAYFSANNMNVKVKTINGSFTDYLRKVWKFKKERNH
GYKHHAEDALIIANADFLFKENKKLKAVNSVLEKPEIETKQLDIQVDSEDNYSEMFIIPKQVQ
DIKDFRNFKYSHRVDKKPNRKLINDTLYSTRKKDNSTYIVQTIKDIYAKDNTTLKKQFDKSPE
KFLMYQHDPRTFEKLEVIMKQYANEKNPLAKYHEETGEYLTKYSKKNNGPIVKSLKYIGNK
LGSHLDVTHQFKSSTKKLVKLSIKPYRFDVYLTDKGYKFITISYLDVLKKDNYYYIPEQKYDK
LKLGKAIDKNAKFIASFYKNDLIKLDGEIYKIIGVNSDTRNMIELDLPDIRYKEYCELNNIKGEP
HIKKTIGKKVNSIEKLTTDVLGNVFTNTQYTKPQLLFKRGN.

[0207] In some embodiments, the Cas protein is any of the engineered Cas proteins disclosed in Schmidt et al., 2021, Nature Communications, “Improved CRISPR genome editing using small highly active and specific engineered RNA-guided nucleases.”

[0208] In some embodiments, the Cas9 comprises an amino acid sequence that is at least 80%, 85%, 90%, 91%, 92%, 93%, 94%, 95%, 96%, 97%, 98%, 99% or 100% identical to the sequence of SEQ ID NO: 7021 (designated herein as sRGN1):

MNQKFILGLDIGITSVGYGLIDYETKNIIDAGVRLFPEANVENNEGRRSKRGSRRLKRRRIHRL
DRVKHLLAEYDLLDLTNIPKSTNPYQTRVKGLNEKLSKDELVIALLHIAKRRGIHNVDVAAD
KEETASDSLSTKDQINKNAKFLESRYVCELQKERLENEGHVRGVENRFLTKDIVREAKKIIDT
QMQYYPEIDETFKEKYISLVETRREYFEGPGKGSPFGWEGNIKKWFEQMMGHCTYFPEELRS
VKYSYSAELFNALNDLNNLVITRDEDAKLNYGEKFQIIENVFKQKKTPNLKQIAIEIGVHETEI
KGYRVNKSGTPEFTEFKLYHDLKSIVFDKSILENEAILDQIAEILTIYQDEQSIKEELNKLPEILN
EQDKAEIAKLIGYNGTHRLSLKCIHLINEELWQTSRNQMEIFNYLNIKPNKVDLSEQNKIPKD
MVNDFILSPVVKRTFIQSINVINKVIEKYGIPEDIIIELARENNSDDRKKFINNLQKKNEATRKRI
NEIIGQTGNQNAKRIVEKIRLHDQQEGKCLYSLKDIPLEDLLRNPNNYDIDHIIPRSVSFDDSM
HNKVLVRREQNAKKNNQTPYQYLTSGYADIKYSVFKQHVLNLAENKDRMTKKKREYLLEE
RDINKFEVQKEFINRNLVDTRYATRELTNYLKAYFSANNMNVKVKTINGSFTDYLRKVWKF
KKERNHGYKHHAEDALIIANADFLFKENKKLKAVNSVLEKPEIETKQLDIQVDSEDNYSEMFI
IPKQVQDIKDFRNFKYSHRVDKKPNRQLINDTLYSTRKKDNSTYIVQTIKDIYAKDNTTLKKQ
FDKSPEKFLMYQHDPRTFEKLEVIMKQYANEKNPLAKYHEETGEYLTKYSKKNNGPIVKSLK
YIGNKLGSHLDVTHQFKSSTKKLVKLSIKPYRFDVYLTDKGYKFITISYLDVLKKDNYYYIPE
QKYDKLKLGKAIDKNAKFIASFYKNDLIKLDGEIYKIIGVNSDTRNMIELDLPDIRYKEYCELN
NIKGEPRIKKTIGKKVNSIEKLTTDVLGNVFTNTQYTKPQLLFKRGN.

[0209] In some embodiments, the Cas9 comprises an amino acid sequence that is at least 80%, 85%, 90%, 91%, 92%, 93%, 94%, 95%, 96%, 97%, 98%, 99% or 100% identical to the sequence of SEQ ID NO: 7022 (designated herein as sRGN2):

MNQKFILGLDIGITSVGYGLIDYETKNIIDAGVRLFPEANVENNEGRRSKRGSRRLKRRRIHRL
ERVKSLLSEYKIISGLAPTNNQPYNIRVKGLTEQLTKDELAVALLHIAKRRGIHKIDVIDSNDD
VGNELSTKEQLNKNSKLLKDKFVCQIQLERMNEGQVRGEKNRFKTADIIKEIIQLLNVQKNFH
QLDENFINKYIELVEMRREYFEGPGQGSPFGWNGDLKKWYEMLMGHCTYFPQELRSVKYA
YSADLFNALNDLNNLIIQRDNSEKLEYHEKYHIIENVFKQKKKPTLKQIAKEIGVNPEDIKGYR
ITKSGTPEFTEFKLYHDLKSVLFDQSILENEDVLDQIAEILTIYQDKDSIKSKLTELDILLNEEDK
ENIAQLTGYNGTHRLSLKCIRLVLEEQWYSSRNQMEIFTHLNIKPKKINLTAANKIPKAMIDEF
ILSPVVKRTFIQSINVINKVIEKYGIPEDIIIELARENNSDDRKKFINNLQKKNEATRKRINEIIGQ
TGNQNAKRIVEKIRLHDQQEGKCLYSLESIALMDLLNNPQNYEVDHIIPRSVAFDNSIHNKVL
VKQIENSKKGNRTPYQYLNSSDAKLSYNQFKQHILNLSKSKDRISKKKKDYLLEERDINKFEV
QKEFINRNLVDTRYATRELTSYLKAYFSANNMDVKVKTINGSFTNHLRKVWRFDKYRNHGY
KHHAEDALIIANADFLFKENKKLKAVNSVLEKPEIETKQLDIQVDSEDNYSEMFIIPKQVQDIK
DFRNFKYSHRVDKKPNRQLINDTLYSTRKKDNSTYIVQTIKDIYAKDNTTLKKQFDKSPEKFL
MYQHDPRTFEKLEVIMKQYANEKNPLAKYHEETGEYLTKYSKKNNGPIVKSLKYIGNKLGS
HLDVTHQFKSSTKKLVKLSIKPYRFDVYLTDKGYKFITISYLDVLKKDNYYYIPEQKYDKLKL
GKAIDKNAKFIASFYKNDLIKLDGEIYKIIGVNSDTRNMIELDLPDIRYKEYCELNNIKGEPRIK
KTIGKKVNSIEKLTTDVLGNVFTNTQYTKPQLLFKRGN.

[0210] In some embodiments, the Cas9 comprises an amino acid sequence that is at least 80%, 85%, 90%, 91%, 92%, 93%, 94%, 95%, 96%, 97%, 98%, 99% or 100% identical to the sequence of SEQ ID NO: 7023 (designated herein as sRGN3):

MNQKFILGLDIGITSVGYGLIDYETKNIIDAGVRLFPEANVENNEGRRSKRGSRRLKRRRIHRL
ERVKLLLTEYDLINKEQIPTSNNPYQIRVKGLSEILSKDELAIALLHLAKRRGIHNVDVAADKE
ETASDSLSTKDQINKNAKFLESRYVCELQKERLENEGHVRGVENRFLTKDIVREAKKIIDTQM
QYYPEIDETFKEKYISLVETRREYFEGPGQGSPFGWNGDLKKWYEMLMGHCTYFPQELRSV
KYAYSADLFNALNDLNNLIIQRDNSEKLEYHEKYHIIENVFKQKKKPTLKQIAKEIGVNPEDIK
GYRITKSGTPEFTSFKLFHDLKKVVKDHAILDDIDLLNQIAEILTIYQDKDSIVAELGQLEYLM
SEADKQSISELTGYTGTHSLSLKCMNMIIDELWHSSMNQMEVFTYLNMRPKKYELKGYQRIP
TDMIDDAILSPVVKRTFIQSINVINKVIEKYGIPEDIIIELARENNSDDRKKFINNLQKKNEATRK
RINEIIGQTGNQNAKRIVEKIRLHDQQEGKCLYSLESIPLEDLLNNPNHYEVDHIIPRSVSFDNS
YHNKVLVKQSENSKKSNLTPYQYFNSGKSKLSYNQFKQHILNLSKSQDRISKKKKEYLLEER
DINKFEVQKEFINRNLVDTRYATRELTNYLKAYFSANNMNVKVKTINGSFTDYLRKVWKFK
KERNHGYKHHAEDALIIANADFLFKENKKLKAVNSVLEKPEIETKQLDIQVDSEDNYSEMFII
PKQVQDIKDFRNFKYSHRVDKKPNRQLINDTLYSTRKKDNSTYIVQTIKDIYAKDNTTLKKQF
DKSPEKFLMYQHDPRTFEKLEVIMKQYANEKNPLAKYHEETGEYLTKYSKKNNGPIVKSLK
YIGNKLGSHLDVTHQFKSSTKKLVKLSIKPYRFDVYLTDKGYKFITISYLDVLKKDNYYYIPE
QKYDKLKLGKAIDKNAKFIASFYKNDLIKLDGEIYKIIGVNSDTRNMIELDLPDIRYKEYCELN
NIKGEPRIKKTIGKKVNSIEKLTTDVLGNVFTNTQYTKPQLLFKRGN.

[0211] In some embodiments, the Cas9 comprises an amino acid sequence that is at least 80%, 85%, 90%, 91%, 92%, 93%, 94%, 95%, 96%, 97%, 98%, 99% or 100% identical to the sequence of SEQ ID NO: 7024 (designated herein as sRGN3.1):

MNQKFILGLDIGITSVGYGLIDYETKNIIDAGVRLFPEANVENNEGRRSKRGSRRLKRRRIHRL
ERVKLLLTEYDLINKEQIPTSNNPYQIRVKGLSEILSKDELAIALLHLAKRRGIHNVDVAADKE
ETASDSLSTKDQINKNAKFLESRYVCELQKERLENEGHVRGVENRFLTKDIVREAKKIIDTQM
QYYPEIDETFKEKYISLVETRREYFEGPGQGSPFGWNGDLKKWYEMLMGHCTYFPQELRSV
KYAYSADLFNALNDLNNLIIQRDNSEKLEYHEKYHIIENVFKQKKKPTLKQIAKEIGVNPEDIK
GYRITKSGTPEFTSFKLFHDLKKVVKDHAILDDIDLLNQIAEILTIYQDKDSIVAELGQLEYLM
SEADKQSISELTGYTGTHSLSLKCMNMIIDELWHSSMNQMEVFTYLNMRPKKYELKGYQRIP
TDMIDDAILSPVVKRTFIQSINVINKVIEKYGIPEDIIIELARENNSDDRKKFINNLQKKNEATRK
RINEIIGQTGNQNAKRIVEKIRLHDQQEGKCLYSLESIPLEDLLNNPNHYEVDHIIPRSVSFDNS
YHNKVLVKQSENSKKSNLTPYQYFNSGKSKLSYNQFKQHILNLSKSQDRISKKKKEYLLEER
DINKFEVQKEFINRNLVDTRYATRELTNYLKAYFSANNMNVKVKTINGSFTDYLRKVWKFK
KERNHGYKHHAEDALIIANADFLFKENKKLKAVNSVLEKPEIETKQLDIQVDSEDNYSEMFII
PKQVQDIKDFRNFKYSHRVDKKPNRQLINDTLYSTRKKDNSTYIVQTIKDIYAKDNTTLKKQF
DKSPEKFLMYQHDPRTFEKLEVIMKQYANEKNPLAKYHEETGEYLTKYSKKNNGPIVKSLK
YIGNKLGSHLDVTHQFKSSTKKLVKLSIKNYRFDVYLTEKGYKFVTIAYLNVFKKDNYYYIP
KDKYQELKEKKKIKDTDQFIASFYKNDLIKLNGDLYKIIGVNSDDRNIIELDYYDIKYKDYCEI
NNIKGEPRIKKTIGKKTESIEKFTTDVLGNLYLHSTEKAPQLIFKRGL.

[0212] In some embodiments, the Cas9 comprises an amino acid sequence that is at least 80%, 85%, 90%, 91%, 92%, 93%, 94%, 95%, 96%, 97%, 98%, 99% or 100% identical to the sequence of SEQ ID NO: 7025 (designated herein as sRGN3.2):

MNQKFILGLDIGITSVGYGLIDYETKNIIDAGVRLFPEANVENNEGRRSKRGSRRLKRRRIHRL
ERVKLLLTEYDLINKEQIPTSNNPYQIRVKGLSEILSKDELAIALLHLAKRRGIHNVDVAADKE
ETASDSLSTKDQINKNAKFLESRYVCELQKERLENEGHVRGVENRFLTKDIVREAKKIIDTQM
QYYPEIDETFKEKYISLVETRREYFEGPGQGSPFGWNGDLKKWYEMLMGHCTYFPQELRSV
KYAYSADLFNALNDLNNLIIQRDNSEKLEYHEKYHIIENVFKQKKKPTLKQIAKEIGVNPEDIK
GYRITKSGTPEFTSFKLFHDLKKVVKDHAILDDIDLLNQIAEILTIYQDKDSIVAELGQLEYLM
SEADKQSISELTGYTGTHSLSLKCMNMIIDELWHSSMNQMEVFTYLNMRPKKYELKGYQRIP
TDMIDDAILSPVVKRTFIQSINVINKVIEKYGIPEDIIIELARENNSDDRKKFINNLQKKNEATRK
RINEIIGQTGNQNAKRIVEKIRLHDQQEGKCLYSLESIPLEDLLNNPNHYEVDHIIPRSVSFDNS
YHNKVLVKQSENSKKSNLTPYQYFNSGKSKLSYNQFKQHILNLSKSQDRISKKKKEYLLEER
DINKFEVQKEFINRNLVDTRYATRELTNYLKAYFSANNMNVKVKTINGSFTDYLRKVWKFK
KERNHGYKHHAEDALIIANADFLFKENKKLKAVNSVLEKPEIETKQLDIQVDSEDNYSEMFII
PKQVQDIKDFRNFKFSHRVDKKPNRQLINDTLYSTRMKDEHDYIVQTITDIYGKDNTNLKKQ
FNKNPEKFLMYQNDPKTFEKLSIIMKQYSDEKNPLAKYYEETGEYLTKYSKKNNGPIVKKIK
LLGNKVGNHLDVTNKYENSTKKLVKLSIKNYRFDVYLTEKGYKFVTIAYLNVFKKDNYYYI
PKDKYQELKEKKKIKDTDQFIASFYKNDLIKLNGDLYKIIGVNSDDRNIIELDYYDIKYKDYC
EINNIKGEPRIKKTIGKKTESIEKFTTDVLGNLYLHSTEKAPQLIFKRGL.

[0213] In some embodiments, the Cas9 comprises an amino acid sequence that is encoded by a nucleic acid molecule at least 80%, 85%, 90%, 91%, 92%, 93%, 94%, 95%, 96%, 97%, 98%, 99% or 100% identical to the sequence of SEQ ID NO: 1 (an exemplary nucleic acid molecule encoding sRGN3.1):

ATGAATCAGAAATTCATCCTGGGACTGGACATCGGCATTACCTCTGTGGGCTACGGCTTG
ATTGACTACGAGACCAAGAACATCATCGACGCCGGCGTTAGACTGTTTCCTGAGGCCAAT
GTGGAAAACAACGAGGGCAGACGGTCTAAGCGGGGCTCTAGACGACTGAAAAGAAGAA
GAATCCACAGACTGGAAAGAGTGAAGCTGCTGCTGACCGAGTACGACCTGATCAATAAG
GAACAGATCCCTACAAGCAACAACCCCTACCAGATTAGAGTGAAGGGCCTGAGCGAGAT
CCTGAGCAAAGACGAGCTGGCCATCGCCCTGCTGCACCTGGCCAAGCGGAGGGGCATCC
ACAACGTGGATGTGGCCGCCGACAAGGAGGAAACCGCCAGCGACTCCCTGAGCACCAAA
GATCAGATCAACAAGAATGCCAAGTTCCTGGAGAGCAGATACGTGTGCGAGCTGCAGAA
GGAGAGATTGGAGAACGAGGGCCACGTGCGGGGCGTGGAGAATAGATTCCTGACAAAA
GATATCGTGCGGGAAGCCAAGAAGATCATCGACACCCAGATGCAGTACTATCCTGAAAT
CGACGAAACCTTCAAGGAGAAGTACATCAGCCTGGTCGAAACCAGACGCGAGTATTTCG
AGGGCCCCGGACAGGGCTCTCCTTTCGGCTGGAACGGCGATCTGAAGAAGTGGTACGAG
ATGCTGATGGGACACTGCACCTACTTCCCTCAAGAGCTGAGATCTGTGAAGTACGCCTAC
AGCGCCGATCTGTTCAACGCCCTGAACGATCTGAACAACCTTATCATCCAGCGGGACAAT
TCTGAGAAGCTGGAATACCACGAGAAATATCATATCATCGAGAACGTCTTTAAACAAAA
GAAAAAGCCTACCCTGAAGCAGATCGCCAAGGAGATCGGAGTGAATCCTGAGGATATCA
AAGGCTACAGAATCACAAAGTCCGGCACCCCTGAGTTCACCAGCTTTAAGCTGTTCCACG
ACCTGAAGAAGGTCGTGAAAGACCACGCCATCCTCGATGACATCGATCTGCTGAACCAG
ATCGCTGAGATCCTGACAATCTACCAGGACAAAGATTCTATCGTGGCTGAACTGGGACA
GCTGGAATACCTTATGAGCGAGGCCGACAAGCAAAGCATCTCCGAACTGACCGGCTACA
CGGGCACCCATAGCCTGAGCCTGAAGTGTATGAACATGATCATCGATGAGCTGTGGCAC
TCTAGCATGAACCAGATGGAAGTTTTCACCTACCTGAACATGCGGCCTAAGAAGTACGA
GCTGAAGGGCTACCAGAGAATCCCCACCGATATGATCGACGACGCCATCCTGAGCCCCG
TGGTGAAAAGAACATTCATCCAGAGCATCAACGTGATCAACAAGGTGATCGAGAAGTAC
GGCATTCCAGAGGACATCATCATCGAGCTGGCCAGAGAAAACAACAGCGACGATAGAA
AGAAGTTTATCAACAACCTGCAGAAAAAAAACGAGGCCACCCGGAAGAGAATTAATGA
GATCATCGGCCAGACAGGCAACCAGAACGCCAAAAGGATCGTGGAAAAAATCAGACTG
CACGACCAGCAGGAGGGCAAGTGCCTGTACTCTCTGGAAAGCATCCCCCTGGAGGACCT
GCTGAACAATCCAAATCACTACGAGGTGGACCACATCATCCCTAGAAGCGTCAGCTTCG
ACAACAGCTACCACAACAAGGTGCTGGTGAAGCAGAGCGAAAACAGTAAGAAATCCAA
CCTGACACCTTACCAGTACTTTAACAGCGGCAAGAGCAAGCTGAGCTACAACCAGTTCA
AGCAGCACATCCTGAACCTGTCCAAATCTCAGGATAGAATCTCCAAGAAAAAGAAGGAA
TACCTGCTGGAGGAGAGAGATATCAACAAGTTCGAAGTCCAAAAGGAGTTCATCAACAG
GAACCTGGTGGACACCCGGTACGCCACAAGAGAGCTGACAAACTACCTGAAAGCCTACT
TCAGCGCTAACAACATGAACGTGAAGGTGAAAACCATCAATGGAAGTTTCACAGACTAC
CTTCGGAAGGTGTGGAAGTTCAAGAAGGAACGGAATCACGGCTACAAGCACCACGCAGA
GGACGCCCTGATTATAGCTAATGCCGATTTCCTGTTCAAAGAAAACAAGAAGCTGAAAG
CCGTGAACAGCGTTCTGGAAAAGCCTGAAATTGAGACCAAGCAACTGGATATACAGGTG
GACAGCGAGGACAACTACTCCGAGATGTTCATCATCCCTAAACAGGTGCAGGACATCAA
AGACTTCAGAAATTTCAAGTACAGCCACAGAGTGGACAAGAAACCCAACCGGCAGCTGA
TCAATGACACCCTGTATAGCACCCGCAAGAAGGATAACAGCACCTACATCGTCCAGACC
ATCAAGGACATCTACGCTAAGGACAACACCACCCTGAAAAAGCAATTTGATAAGTCCCC
CGAAAAGTTTCTGATGTACCAACACGATCCTAGAACCTTCGAAAAGTTGGAGGTGATCAT
GAAGCAATATGCCAACGAGAAGAACCCACTGGCCAAGTACCATGAGGAGACAGGAGAA
TACCTGACCAAGTATTCTAAGAAGAATAACGGCCCCATCGTGAAGTCCCTGAAGTACATT
GGGAACAAACTCGGAAGCCACCTGGACGTGACGCACCAGTTCAAGAGCAGCACCAAGA
AGCTAGTGAAACTGAGCATCAAGAACTACAGATTCGACGTGTACCTGACAGAAAAGGGC
TACAAATTTGTGACCATCGCTTACCTGAATGTGTTCAAAAAGGACAATTATTACTACATC
CCAAAGGACAAGTACCAGGAGCTTAAAGAGAAAAAAAAGATCAAGGATACCGACCAGT
TTATCGCTAGCTTCTACAAGAACGACCTGATTAAGCTGAACGGCGACCTGTACAAGATCA
TCGGCGTGAACTCTGACGACCGGAACATAATAGAGCTGGATTATTATGACATCAAGTAC
AAGGACTACTGCGAGATCAACAACATCAAGGGCGAGCCTAGAATCAAAAAGACCATCG
GGAAGAAAACCGAGTCTATCGAAAAGTTTACAACAGACGTGCTGGGCAACCTGTACCTG
CACAGCACGGAAAAGGCCCCTCAGCTCATCTTCAAGAGAGGCCTG.

[0214] In some embodiments, the Cas9 comprises an amino acid sequence that is at least 80%, 85%, 90%, 91%, 92%, 93%, 94%, 95%, 96%, 97%, 98%, 99% or 100% identical to the sequence of SEQ ID NO: 7026 (designated herein as sRGN3.3):

MNQKFILGLDIGITSVGYGLIDYETKNIIDAGVRLFPEANVENNEGRRSKRGSRRLKRRRIHRL
ERVKLLLTEYDLINKEQIPTSNNPYQIRVKGLSEILSKDELAIALLHLAKRRGIHNVDVAADKE
ETASDSLSTKDQINKNAKFLESRYVCELQKERLENEGHVRGVENRFLTKDIVREAKKIIDTQM
QYYPEIDETFKEKYISLVETRREYFEGPGQGSPFGWNGDLKKWYEMLMGHCTYFPQELRSV
KYAYSADLFNALNDLNNLIIQRDNSEKLEYHEKYHIIENVFKQKKKPTLKQIAKEIGVNPEDIK
GYRITKSGTPEFTSFKLFHDLKKVVKDHAILDDIDLLNQIAEILTIYQDKDSIVAELGQLEYLM
SEADKQSISELTGYTGTHSLSLKCMNMIIDELWHSSMNQMEVFTYLNMRPKKYELKGYQRIP
TDMIDDAILSPVVKRTFIQSINVINKVIEKYGIPEDIIIELARENNSDDRKKFINNLQKKNEATRK
RINEIIGQTGNQNAKRIVEKIRLHDQQEGKCLYSLESIPLEDLLNNPNHYEVDHIIPRSVSFDNS
YHNKVLVKQSENSKKSNLTPYQYFNSGKSKLSYNQFKQHILNLSKSQDRISKKKKEYLLEER
DINKFEVQKEFINRNLVDTRYATRELTSYLKAYFSANNMDVKVKTINGSFTNHLRKVWRFD
KYRNHGYKHHAEDALIIANADFLFKENKKLQNTNKILEKPTIENNTKKVTVEKEEDYNNVFE
TPKLVEDIKQYRDYKFSHRVDKKPNRQLINDTLYSTRMKDEHDYIVQTITDIYGKDNTNLKK
QFNKNPEKFLMYQNDPKTFEKLSIIMKQYSDEKNPLAKYYEETGEYLTKYSKKNNGPIVKKI
KLLGNKVGNHLDVTNKYENSTKKLVKLSIKNYRFDVYLTEKGYKFVTIAYLNVFKKDNYYY
IPKDKYQELKEKKKIKDTDQFIASFYKNDLIKLNGDLYKIIGVNSDDRNIIELDYYDIKYKDYC
EINNIKGEPRIKKTIGKKTESIEKFTTDVLGNLYLHSTEKAPQLIFKRGL.

[0215] In some embodiments, the Cas9 comprises an amino acid sequence that is encoded by a nucleic acid molecule at least 80%, 85%, 90%, 91%, 92%, 93%, 94%, 95%, 96%, 97%, 98%, 99% or 100% identical to the sequence of SEQ ID NO: 2 (an exemplary nucleic acid molecule encoding sRGN3.3):

AACCAGAAGTTTATCCTGGGCCTGGATATCGGCATCACATCCGTGGGCTACGGCCTGATT
GATTACGAAACCAAGAACATCATTGATGCCGGCGTCCGGCTTTTCCCTGAAGCTAACGTG
GAAAACAATGAGGGCAGACGGAGCAAGAGAGGCAGCAGACGGCTGAAGCGGAGAAGA
ATCCATAGACTCGAACGGGTGAAGCTGCTGCTGACCGAGTACGACCTGATCAACAAGGA
GCAGATCCCCACCAGCAACAACCCATACCAGATCAGAGTGAAAGGCCTTTCTGAGATTC
TGAGCAAGGATGAGCTGGCTATCGCTCTGCTCCACCTGGCCAAGAGAAGGGGAATCCAC
AACGTTGACGTGGCCGCCGATAAGGAAGAGACCGCCAGCGATAGCCTGAGCACCAAGG
ACCAGATCAACAAGAACGCCAAGTTCCTGGAAAGCAGATACGTGTGCGAGCTGCAAAAA
GAGAGACTGGAAAATGAGGGCCATGTGCGGGGCGTTGAGAACAGATTCCTGACCAAAG
ACATCGTCAGAGAGGCCAAGAAAATTATTGACACCCAGATGCAGTACTATCCTGAGATA
GACGAGACCTTTAAGGAAAAGTACATCAGCCTGGTGGAAACAAGAAGAGAATACTTCGA
AGGACCTGGCCAGGGCTCCCCTTTCGGCTGGAACGGCGACCTGAAGAAGTGGTACGAGA
TGCTGATGGGCCACTGCACCTACTTCCCCCAGGAGCTGCGGAGCGTGAAGTACGCTTACA
GCGCCGACCTGTTCAATGCCCTGAACGACCTGAACAATCTTATCATCCAAAGAGATAACA
GCGAGAAATTAGAATACCACGAGAAGTACCACATCATCGAGAATGTGTTCAAGCAAAAG
AAGAAGCCTACCCTGAAGCAGATCGCCAAAGAGATCGGCGTGAACCCTGAGGACATCAA
GGGCTATCGGATCACCAAGTCCGGCACCCCTGAATTCACCAGCTTCAAGCTGTTTCACGA
CCTCAAAAAGGTCGTGAAGGACCACGCCATCCTGGACGACATCGATCTGCTGAATCAGA
TCGCCGAGATCCTGACCATCTACCAGGACAAGGACTCTATCGTGGCCGAGCTTGGACAG
CTGGAGTACCTGATGAGCGAGGCTGACAAGCAGAGCATCAGCGAGCTGACCGGCTACAC
CGGAACCCACAGCCTGTCCCTGAAGTGCATGAACATGATCATCGACGAGCTGTGGCACT
CTAGCATGAACCAGATGGAAGTGTTCACCTACCTGAACATGAGACCTAAGAAGTACGAA
CTGAAGGGTTACCAGAGAATCCCAACCGACATGATCGACGACGCCATCCTGAGCCCCGT
GGTGAAGCGGACCTTTATCCAGAGCATCAATGTGATCAACAAGGTGATCGAGAAATACG
GCATCCCCGAGGACATCATCATCGAACTGGCCAGAGAGAATAACTCTGATGACCGGAAG
AAGTTCATCAACAACCTGCAGAAGAAGAACGAAGCCACCAGAAAGCGCATCAACGAGA
TCATCGGCCAAACAGGGAATCAGAACGCCAAGAGGATCGTGGAAAAGATTCGGCTGCAC
GACCAGCAGGAGGGAAAATGCCTGTACAGCCTGGAAAGCATCCCCCTGGAAGATCTACT
GAACAACCCCAACCACTACGAGGTGGATCACATCATCCCTAGAAGCGTGTCCTTTGACA
ACAGTTACCACAACAAGGTGCTGGTGAAGCAATCCGAGAACTCGAAGAAGAGCAACCTG
ACACCTTACCAGTACTTTAACAGCGGCAAGTCCAAGCTGTCTTATAACCAGTTCAAGCAG
CACATCCTCAACCTGTCAAAGTCTCAGGACAGAATCTCTAAGAAGAAGAAGGAGTATCT
GCTGGAAGAGCGGGACATCAACAAGTTCGAGGTGCAGAAAGAGTTCATTAACAGAAACC
TGGTCGACACCCGGTACGCCACACGCGAACTGACAAGCTACCTGAAGGCCTACTTCTCCG
CCAACAATATGGACGTGAAGGTCAAGACCATCAATGGCAGCTTCACAAATCACCTGAGA
AAGGTCTGGCGGTTCGACAAGTACAGAAACCACGGCTACAAGCACCACGCCGAGGATGC
TCTGATTATCGCCAACGCCGACTTCCTGTTCAAGGAAAACAAAAAACTGCAGAACACCA
ACAAGATCCTGGAAAAACCTACAATCGAGAACAACACAAAGAAAGTGACAGTGGAAAA
AGAGGAAGATTACAACAACGTGTTTGAGACACCTAAGCTGGTTGAGGATATCAAGCAGT
ACCGGGACTATAAGTTTAGCCACAGAGTGGACAAGAAACCTAACAGGCAGCTGATCAAC
GACACTCTGTACAGCACAAGAATGAAAGATGAGCACGATTACATCGTGCAGACCATTAC
CGACATCTACGGCAAGGACAACACCAATCTGAAGAAGCAGTTCAACAAAAATCCCGAGA
AGTTCCTGATGTACCAAAATGACCCTAAGACATTCGAGAAGCTGAGCATCATCATGAAA
CAGTACTCTGATGAGAAGAACCCACTGGCCAAGTACTACGAGGAAACAGGCGAATACCT
GACCAAGTACTCTAAGAAGAACAACGGCCCTATCGTGAAGAAGATCAAACTGCTGGGCA
ACAAAGTGGGAAATCATCTGGATGTGACCAATAAATACGAGAACTCTACAAAGAAACTG
GTGAAGCTGAGCATTAAGAACTACAGATTCGACGTCTACCTGACAGAAAAGGGATACAA
GTTCGTGACCATCGCCTACCTGAACGTGTTCAAGAAAGACAACTACTACTACATCCCAAA
AGACAAGTACCAAGAGTTAAAAGAGAAGAAGAAGATAAAGGATACCGACCAGTTTATC
GCTTCTTTCTACAAGAACGACCTGATCAAGCTGAACGGTGATCTGTACAAAATCATCGGA
GTGAATAGCGATGACAGAAATATCATCGAACTGGATTACTATGACATCAAGTACAAAGA
TTATTGTGAAATCAACAACATCAAGGGAGAGCCCAGAATTAAGAAAACCATCGGCAAGA
AAACAGAGAGCATCGAGAAATTCACCACAGATGTGCTGGGCAACCTGTACCTGCACAGC
ACAGAGAAAGCCCCTCAGCTCATCTTCAAGAGAGGCCTG.

[0216] In some embodiments, the Cas9 comprises an amino acid sequence that is at least 80%, 85%, 90%, 91%, 92%, 93%, 94%, 95%, 96%, 97%, 98%, 99% or 100% identical to the sequence of SEQ ID NO: 7027 (designated herein as sRGN4):

MNQKFILGLDIGITSVGYGLIDYETKNIIDAGVRLFPEANVENNEGRRSKRGSRRLKRRRIHRL
ERVKKLLEDYNLLDQSQIPQSTNPYAIRVKGLSEALSKDELVIALLHIAKRRGIHNINVSSEDE
DASNELSTKEQINRNNKLLKDKYVCEVQLQRLKEGQIRGEKNRFKTTDILKEIDQLLKVQKD
YHNLDIDFINQYKEIVETRREYFEGPGKGSPYGWEGDPKAWYETLMGHCTYFPDELRSVKY
AYSADLFNALNDLNNLVIQRDGLSKLEYHEKYHIIENVFKQKKKPTLKQIANEINVNPEDIKG
YRITKSGKPEFTSFKLFHDLKKVVKDHAILDDIDLLNQIAEILTIYQDKDSIVAELGQLEYLMS
EADKQSISELTGYTGTHSLSLKCMNMIIDELWHSSMNQMEVFTYLNMRPKKYELKGYQRIPT
DMIDDAILSPVVKRTFIQSINVINKVIEKYGIPEDIIIELARENNSDDRKKFINNLQKKNEATRKR
INEIIGQTGNQNAKRIVEKIRLHDQQEGKCLYSLESIPLEDLLNNPNHYEVDHIIPRSVSFDNSY
HNKVLVKQSENSKKSNLTPYQYFNSGKSKLSYNQFKQHILNLSKSQDRISKKKKEYLLEERDI
NKFEVQKEFINRNLVDTRYATRELTNYLKAYFSANNMNVKVKTINGSFTDYLRKVWKFKKE
RNHGYKHHAEDALIIANADFLFKENKKLKAVNSVLEKPEIETKQLDIQVDSEDNYSEMFIIPK
QVQDIKDFRNFKYSHRVDKKPNRQLINDTLYSTRKKDNSTYIVQTIKDIYAKDNTTLKKQFD
KSPEKFLMYQHDPRTFEKLEVIMKQYANEKNPLAKYHEETGEYLTKYSKKNNGPIVKSLKYI
GNKLGSHLDVTHQFKSSTKKLVKLSIKPYRFDVYLTDKGYKFITISYLDVLKKDNYYYIPEQK
YDKLKLGKAIDKNAKFIASFYKNDLIKLDGEIYKIIGVNSDTRNMIELDLPDIRYKEYCELNNI
KGEPRIKKTIGKKVNSIEKLTTDVLGNVFTNTQYTKPQLLFKRGN.

[0217] In some embodiments, the Cas9 comprises an amino acid sequence that is encoded by a nucleic acid molecule at least 80%, 85%, 90%, 91%, 92%, 93%, 94%, 95%, 96%, 97%, 98%, 99% or 100% identical to the sequence of SEQ ID NO: 3 (an exemplary nucleic acid molecule encoding sRGN4):

ATGAATCAAAAGTTTATCCTGGGTCTGGACATCGGCATCACATCTGTGGGCTA
CGGCCTTATCGATTACGAGACCAAGAATATCATTGATGCTGGCGTACGGCTGTTCCCTGA
GGCTAACGTGGAAAACAACGAGGGTAGACGGAGCAAGAGAGGCAGCAGACGGCTGAAA
CGGCGTAGAATCCACCGGCTGGAGAGAGTGAAGAAGTTGCTGGAAGATTACAACTTGCT
GGATCAATCCCAGATCCCCCAGAGCACTAATCCTTATGCTATCCGGGTGAAGGGCCTGTC
TGAAGCCCTGAGCAAAGACGAGCTGGTGATTGCCCTGCTGCACATCGCGAAGAGAAGAG
GCATCCACAATATCAATGTGTCCTCTGAGGATGAGGATGCCAGCAACGAGCTGAGCACT
AAGGAACAGATCAATCGGAACAACAAGCTGCTGAAGGACAAGTACGTGTGTGAAGTGC
AGCTGCAGAGACTGAAGGAAGGCCAGATAAGAGGCGAAAAGAACAGATTCAAGACAAC
AGACATCCTGAAAGAAATCGACCAGCTGCTGAAGGTCCAGAAGGACTACCACAACCTCG
ACATCGATTTCATTAACCAGTACAAGGAAATCGTGGAAACCAGGAGAGAGTACTTCGAG
GGCCCTGGCAAGGGCTCCCCATACGGCTGGGAGGGCGACCCCAAGGCCTGGTACGAAAC
CCTGATGGGCCACTGCACCTACTTCCCCGACGAACTGAGAAGCGTCAAGTACGCCTACA
GCGCCGATCTGTTCAACGCCCTGAACGACCTGAACAACCTGGTGATCCAGCGGGACGGC
CTGAGCAAACTGGAGTACCATGAAAAGTATCATATCATCGAGAACGTGTTCAAGCAGAA
GAAAAAACCTACCCTGAAGCAGATCGCCAACGAGATCAACGTGAACCCTGAGGACATTA
AAGGCTACAGAATCACCAAAAGCGGCAAGCCAGAGTTCACCAGCTTCAAGCTGTTTCAC
GACCTGAAGAAGGTCGTGAAAGACCACGCCATCCTGGACGACATCGATCTGCTTAACCA
GATCGCTGAAATCCTCACAATCTACCAGGACAAGGACTCTATCGTGGCCGAGCTGGGAC
AGCTGGAATACCTGATGAGCGAGGCCGATAAGCAGAGCATCAGCGAGCTGACCGGCTAC
ACCGGAACCCACAGCCTGAGCCTGAAGTGTATGAACATGATCATCGACGAGCTGTGGCA
CAGCTCTATGAACCAGATGGAAGTATTCACCTACCTGAACATGAGACCTAAGAAGTACG
AACTGAAGGGCTATCAGAGAATCCCTACAGACATGATCGACGATGCCATCCTGTCTCCTG
TGGTGAAGAGAACCTTCATCCAGTCTATCAACGTGATCAACAAGGTGATCGAAAAGTAC
GGAATCCCTGAAGATATCATCATCGAACTGGCCAGAGAGAACAACTCCGACGACAGAAA
GAAATTCATCAACAACCTGCAGAAGAAGAATGAGGCCACACGGAAGCGGATTAATGAG
ATCATCGGCCAAACCGGCAACCAGAACGCCAAAAGAATCGTGGAAAAGATCCGGCTGCA
CGATCAGCAGGAGGGCAAATGCCTGTACAGCCTGGAGAGCATCCCCCTGGAGGACCTGC
TCAACAACCCCAACCACTACGAGGTGGATCACATCATCCCAAGATCTGTTAGCTTCGACA
ACAGCTACCACAACAAGGTGCTGGTGAAGCAAAGCGAAAACTCTAAGAAATCTAACCTG
ACACCTTACCAGTACTTTAACAGCGGCAAGTCCAAGCTGTCTTATAACCAGTTTAAGCAG
CACATCCTGAACCTGAGCAAGTCCCAGGATAGAATCAGCAAAAAAAAGAAGGAATACCT
GCTGGAGGAACGCGACATCAATAAATTTGAGGTGCAAAAGGAGTTCATCAACCGGAACC
TGGTGGACACCCGGTACGCCACCAGAGAACTGACCAACTACCTGAAAGCCTACTTCAGC
GCCAACAACATGAACGTGAAGGTGAAAACCATCAACGGAAGCTTCACCGACTACCTGCG
GAAGGTGTGGAAGTTCAAGAAAGAGCGGAATCACGGCTATAAGCACCACGCTGAGGAC
GCTCTGATCATCGCCAATGCCGATTTCCTGTTCAAGGAAAACAAGAAGTTAAAGGCCGTG
AACTCTGTCCTGGAGAAGCCCGAGATCGAGACAAAGCAGCTGGACATCCAAGTGGACTC
AGAGGACAATTACTCTGAGATGTTCATCATCCCCAAGCAGGTGCAGGACATCAAGGATT
TTAGAAATTTCAAGTACAGCCATAGAGTGGACAAGAAGCCCAATAGACAGCTGATCAAC
GATACACTGTACAGCACCAGAAAGAAGGACAACAGCACATATATCGTCCAGACCATCAA
GGACATTTACGCAAAGGATAACACCACACTGAAGAAGCAGTTCGACAAAAGCCCTGAGA
AGTTCCTGATGTACCAACACGACCCTCGGACCTTCGAGAAGTTAGAGGTTATCATGAAAC
AGTACGCCAACGAGAAAAACCCTCTGGCCAAGTACCACGAGGAAACCGGAGAATACCTG
ACAAAATATAGCAAGAAGAACAACGGCCCCATCGTGAAAAGCCTGAAGTACATCGGCA
ACAAGCTGGGCAGCCACCTGGACGTGACCCACCAGTTCAAGAGCAGCACCAAGAAGCTG
GTCAAGCTGAGCATCAAGCCTTATAGGTTCGACGTGTACCTGACAGATAAGGGATACAA
GTTCATCACCATCAGCTACCTGGATGTTCTGAAAAAGGACAATTACTACTACATCCCTGA
GCAGAAGTACGACAAACTCAAGCTGGGCAAGGCCATCGATAAGAATGCCAAGTTCATCG
CATCTTTTTACAAGAACGACCTGATCAAACTGGACGGCGAGATCTACAAGATCATAGGA
GTGAACAGCGACACCAGGAATATGATCGAGCTCGATCTGCCTGACATCAGATACAAGGA
ATACTGCGAGCTGAACAACATCAAGGGAGAGCCTAGAATCAAGAAAACCATCGGCAAG
AAGGTGAACAGCATCGAGAAACTTACAACAGATGTGCTCGGCAACGTGTTCACCAACAC
CCAGTACACCAAGCCACAGCTGCTGTTTAAGCGGGGGAAC.

[0218] In some embodiments, the Cas9 comprises an amino acid sequence that is at least 80%, 85%, 90%, 91%, 92%, 93%, 94%, 95%, 96%, 97%, 98%, 99% or 100% identical to the sequence of SEQ ID NO: 7028 (designated herein as Staphylococcus hyicus Cas9 or ShyCas9):

MNNYILGLDIGITSVGYGIVDSDTREIKDAGVRLFPEANVDNNEGRRSKRGARRLKR
RRIHRLDRVKHLLAEYDLLDLTNIPKSTNPYQTRVKGLNEKLSKDELVIALLHIAKRRGIHNV
NVMMDDNDSGNELSTKDQLKKNAKALSDKYVCELQLERFEQDYKVRGEKNRFKTEDFVRE
ARKLLETQSKFFEIDQTFIMRYIELIETRREYFEGPGKGSPFGWEGNIKKWFEQMMGHCTYFP
EELRSVKYSYSAELFNALNDLNNLVITRDEDAKLNYGEKFQIIENVFKQKKTPNLKQIAIEIGV
HETEIKGYRVNKSGKPEFTQFKLYHDLKNIFKDPKYLNDIQLMDNIAEIITIYQDAESIIKELNQ
LPELLSEREKEKISALSGYSGTHRLSLKCINLLLDDLWESSLNQMELFTKLNLKPKKIDLSQQH
KIPSKLVDDFILSPVVKRAFIQSIQVVNAIIDKYGLPEDIIIELARENNSDDRRKFLNQLQKQNE
ETRKQVEKVLREYGNDNAKRIVQKIKLHNMQEGKCLYSLKDIPLEDLLRNPHHYEVDHIIPRS
VAFDNSMHNKVLVRADENSKKGNRTPYQYLNSSESSLSYNEFKQHILNLSKTKDRITKKKRE
YLLEERDINKFDVQKEFINRNLVDTRYATRELTSLLKAYFSANNLDVKVKTINGSFTNYLRKV
WKFDKDRNKGYKHHAEDALIIANADFLFKHNKKLRNINKVLDAPSKEVDKKRVTVQSEDEY
NQIFEDTQKAQAIKKFEIRKFSHRVDKKPNRQLINDTLYSTRNIDGIEYVVESIKDIYSVNNDK
VKTKFKKDPHRLLMYRNDPQTFEKFEKVFKQYESEKNPFAKYYEETGEKIRKFSKTGQGPYI
NKIKYLRERLGRHCDVTNKYINSRNKIVQLKIYSYRFDIYQYGNNYKMITISYIDLEQKSNYY
YISREKYEQKKKDKQIDDSYKFIGSFYKNDIINYNGEMYRVIGVNDSEKNKIQLDMIDISIKDY
MELNNIKKTGVIYKTIGKSTTHIEKYTTDILGNLYKAAPPKKPQLIFK.

[0219] In some embodiments, the Cas9 comprises an amino acid sequence that is at least 80%, 85%, 90%, 91%, 92%, 93%, 94%, 95%, 96%, 97%, 98%, 99% or 100% identical to the sequence of SEQ ID NO: 7029 (designated herein as Staphylococcus microti Cas9 or Smi Cas9):

MEKDYILGLDIGIGSVGYGLIDYDTKSIIDAGVRLFPEANADNNLGRRAKRGARRLKRRRIHR
LERVKSLLSEYKIISGLAPTNNQPYNIRVKGLTEQLTKDELAVALLHIAKRRGIHNVDVAADK
EETASDSLSTKDQINKNAKFLESRYVCELQKERLENEGHVRGVENRFLTKDIVREAKKIIDTQ
MQYYPEIDETFKEKYISLVETRREYYEGPGKGSPYGWDADVKKWYQLMMGHCTYFPVEFRS
VKYAYTADLYNALNDLNNLTIARDDNPKLEYHEKYHIIENVFKQKRNPTLKQIAKEIGVNDI
NISGYRVTKSGKPQFTSFKLFHDLKKVVKDHAILDDIDLLNQIAEILTIYQDKDSIVAELGQLE
YLMSEADKQSISELTGYTGTHSLSLKCMNMIIDELWHSSMNQMEVFTYLNMRPKKYELKGY
QRIPTDMIDDAILSPVVKRSFKQAIGVVNAIIKKYGLPKDIIIELARESNSAEKSRYLRAIQKKN
EKTRERIEAIIKEYGNENAKGLVQKIKLHDAQEGKCLYSLKDIPLEDLLRNPNNYDIDHIIPRS
VSFDDSMHNKVLVRREQNAKKNNQTPYQYLTSGYADIKYSVFKQHVLNLAENKDRMTKKK
REYLLEERNINKYDVQKEFINRNLVDTRYTTRELTTLLKTYFTINNLDVKVKTINGSFTDFLR
KRWGFKKNRDEGYKHHAEDALIIANADYLFKEHKLLKEIKDVSDLAGDERNSNVKDEDQYE
EVFGGYFKIEDIKKYKIKKFSHRVDKKPNRQLINDTIYSTRVKDDKRYLINTLKNLYDKSNGD
LKERMQKDPESLLMYHHDPQTFEKLKIVMSQYENEKNPLAKYFEETGQYLTKYAKHDNGPA
IHKIKYYGNKLVEHLDITKNYHNPQNKVVQLSQKSFRFDVYQTDKGYKFISIAYLTLKNEKN
YYAISQEKYDQLKSEKKISNNAVFIGSFYTSDIIEINNEKFRVIGVNSDKNNLIEVDRIDIRQKEF
IELEEEKKNNRIKVTIGRKTTNIEKFHTDILGNMYKSKRPKAPQLVFKKG.

[0220] In some embodiments, the Cas9 comprises an amino acid sequence that is at least 80%, 85%, 90%, 91%, 92%, 93%, 94%, 95%, 96%, 97%, 98%, 99% or 100% identical to the sequence of SEQ ID NO: 7030 (designated herein as Staphylococcus pasteuri Cas9 or Spa Cas9):

MKEKYILGLDLGITSVGYGIINFETKKIIDAGVRLFPEANVDNNEGRRSKRGSRRLKRRRIHRL
ERVKLLLTEYDLINKEQIPTSNNPYQIRVKGLSEILSKDELAIALLHLAKRRGIHNINVSSEDED
ASNELSTKEQINRNNKLLKDKYVCEVQLQRLKEGQIRGEKNRFKTTDILKEIDQLLKVQKDY
HNLDIDFINQYKEIVETRREYFEGPGQGSPFGWNGDLKKWYEMLMGHCTYFPQELRSVKYA
YSADLFNALNDLNNLIIQRDNSEKLEYHEKYHIIENVFKQKKKPTLKQIAKEIGVNPEDIKGYR
ITKSGTPQFTEFKLYHDLKSIVFDKSILENEAILDQIAEILTIYQDEQSIKEELNKLPEILNEQDK
AEIAKLIGYNGTHRLSLKCIHLINEELWQTSRNQMEIFNYLNIKPNKVDLSEQNKIPKDMVND
FILSPVVKRTFIQSINVINKVIEKYGIPEDIIIELARENNSDDRKKFINNLQKKNEATRKRINEIIG
QTGNQNAKRIVEKIRLHDQQEGKCLYSLESIALMDLLNNPQNYEVDHIIPRSVAFDNSIHNKV
LVKQIENSKKGNRTPYQYLNSSDAKLSYNQFKQHILNLSKSKDRISKKKKDYLLEERDINKFE
VQKEFINRNLVDTRYATRELTSYLKAYFSANNMDVKVKTINGSFTNHLRKVWRFDKYRNHG
YKHHAEDALIIANADFLFKENKKLQNTNKILEKPTIENNTKKVTVEKEEDYNNVFETPKLVED
IKQYRDYKFSHRVDKKPNRQLINDTLYSTRMKDEHDYIVQTITDIYGKDNTNLKKQFNKNPE
KFLMYQNDPKTFEKLSIIMKQYSDEKNPLAKYYEETGEYLTKYSKKNNGPIVKKIKLLGNKV
GNHLDVTNKYENSTKKLVKLSIKNYRFDVYLTEKGYKFVTIAYLNVFKKDNYYYIPKDKYQ
ELKEKKKIKDTDQFIASFYKNDLIKLNGDLYKIIGVNSDDRNIIELDYYDIKYKDYCEINNIKG
EPRIKKTIGKKTESIEKFTTDVLGNLYLHSTEKAPQLIFKRGL.

[0221] In some embodiments, the Cas protein comprises an amino acid sequence that is at least 80%, 85%, 90%, 91%, 92%, 93%, 94%, 95%, 96%, 97%, 98%, 99% or 100% identical to the sequence of SEQ ID NO: 7031 (designated herein as Cas12i1):

MSNKEKNASETRKAYTTKMIPRSHDRMKLLGNFMDYLMDGTPIFFELWNQFGGGIDRDIISG
TANKDKISDDLLLAVNWFKVMPINSKPQGVSPSNLANLFQQYSGSEPDIQAQEYFASNFDTE
KHQWKDMRVEYERLLAELQLSRSDMHHDLKLMYKEKCIGLSLSTAHYITSVMFGTGAKNN
RQTKHQFYSKVIQLLEESTQINSVEQLASIILKAGDCDSYRKLRIRCSRKGATPSILKIVQDYEL
GTNHDDEVNVPSLIANLKEKLGRFEYECEWKCMEKIKAFLASKVGPYYLGSYSAMLENALS
PIKGMTTKNCKFVLKQIDAKNDIKYENEPFGKIVEGFFDSPYFESDTNVKWVLHPHHIGESNI
KTLWEDLNAIHSKYEEDIASLSEDKKEKRIKVYQGDVCQTINTYCEEVGKEAKTPLVQLLRY
LYSRKDDIAVDKIIDGITFLSKKHKVEKQKINPVIQKYPSFNFGNNSKLLGKIISPKDKLKHNL
KCNRNQVDNYIWIEIKVLNTKTMRWEKHHYALSSTRFLEEVYYPATSENPPDALAARFRTKT
NGYEGKPALSAEQIEQIRSAPVGLRKVKKRQMRLEAARQQNLLPRYTWGKDFNINICKRGN
NFEVTLATKVKKKKEKNYKVVLGYDANIVRKNTYAAIEAHANGDGVIDYNDLPVKPIESGF
VTVESQVRDKSYDQLSYNGVKLLYCKPHVESRRSFLEKYRNGTMKDNRGNNIQIDFMKDFE
AIADDETSLYYFNMKYCKLLQSSIRNHSSQAKEYREEIFELLRDGKLSVLKLSSLSNLSFVMF
KVAKSLIGTYFGHLLKKPKNSKSDVKAPPITDEDKQKADPEMFALRLALEEKRLNKVKSKKE
VIANKIVAKALELRDKYGPVLIKGENISDTTKKGKKSSTNSFLMDWLARGVANKVKEMVM
MHQGLEFVEVNPNFTSHQDPFVHKNPENTFRARYSRCTPSELTEKNRKEILSFLSDKPSKRPT
NAYYNEGAMAFLATYGLKKNDVLGVSLEKFKQIMANILHQRSEDQLLFPSRGGMFYLATYK
LDADATSVNWNGKQFWVCNADLVAAYNVGLVDIQKDFKKK.

[0222] In some embodiments, the Cas protein comprises an amino acid sequence that is at least 80%, 85%, 90%, 91%, 92%, 93%, 94%, 95%, 96%, 97%, 98%, 99% or 100% identical to the sequence of SEQ ID NO: 7032 (designated herein as Cas12i2):

MSSAIKSYKSVLRPNERKNQLLKSTIQCLEDGSAFFFKMLQGLFGGITPEIVRFSTEQEKQQQD
IALWCAVNWFRPVSQDSLTHTIASDNLVEKFEEYYGGTASDAIKQYFSASIGESYYWNDCRQ
QYYDLCRELGVEVSDLTHDLEILCREKCLAVATESNQNNSIISVLFGTGEKEDRSVKLRITKKI
LEAISNLKEIPKNVAPIQEIILNVAKATKETFRQVYAGNLGAPSTLEKFIAKDGQKEFDLKKLQ
TDLKKVIRGKSKERDWCCQEELRSYVEQNTIQYDLWAWGEMFNKAHTALKIKSTRNYNFA
KQRLEQFKEIQSLNNLLVVKKLNDFFDSEFFSGEETYTICVHHLGGKDLSKLYKAWEDDPAD
PENAIVVLCDDLKNNFKKEPIRNILRYIFTIRQECSAQDILAAAKYNQQLDRYKSQKANPSVL
GNQGFTWTNAVILPEKAQRNDRPNSLDLRIWLYLKLRHPDGRWKKHHIPFYDTRFFQEIYAA
GNSPVDTCQFRTPRFGYHLPKLTDQTAIRVNKKHVKAAKTEARIRLAIQQGTLPVSNLKITEIS
ATINSKGQVRIPVKFDVGRQKGTLQIGDRFCGYDQNQTASHAYSLWEVVKEGQYHKELGCF
VRFISSGDIVSITENRGNQFDQLSYEGLAYPQYADWRKKASKFVSLWQITKKNKKKEIVTVE
AKEKFDAICKYQPRLYKFNKEYAYLLRDIVRGKSLVELQQIRQEIFRFIEQDCGVTRLGSLSLS
TLETVKAVKGIIYSYFSTALNASKNNPISDEQRKEFDPELFALLEKLELIRTRKKKQKVERIAN
SLIQTCLENNIKFIRGEGDLSTTNNATKKKANSRSMDWLARGVFNKIRQLAPMHNITLFGCGS
LYTSHQDPLVHRNPDKAMKCRWAAIPVKDIGDWVLRKLSQNLRAKNIGTGEYYHQGVKEF
LSHYELQDLEEELLKWRSDRKSNIPCWVLQNRLAEKLGNKEAVVYIPVRGGRIYFATHKVAT
GAVSIVFDQKQVWVCNADHVAAANIALTVKGIGEQSSDEENPDGSRIKLQLTS.

### Modified Guide RNAs

[0223] In some embodiments, the guide RNA is chemically modified. A guide RNA comprising one or more modified nucleosides or nucleotides is called a “modified” guide RNA or “chemically modified” guide RNA, to describe the presence of one or more non-naturally and/or naturally occurring components or configurations that are used instead of or in addition to the canonical A, G, C, and U residues. In some embodiments, a modified guide RNA is synthesized with a non-canonical nucleoside or nucleotide, is here called “modified.” Modified nucleosides and nucleotides can include one or more of: (i) alteration, e.g., replacement, of one or both of the non-linking phosphate oxygens and/or of one or more of the linking phosphate oxygens in the phosphodiester backbone linkage (an exemplary backbone modification); (ii) alteration, e.g., replacement, of a constituent of the ribose sugar, e.g., of the 2′ hydroxyl on the ribose sugar (an exemplary sugar modification); (iii) wholesale replacement of the phosphate moiety with “dephospho” linkers (an exemplary backbone modification); (iv) modification or replacement of a naturally occurring nucleobase, including with a non-canonical nucleobase (an exemplary base modification); (v) replacement or modification of the ribose-phosphate backbone (an exemplary backbone modification); (vi) modification of the 3′ end or 5′ end of the oligonucleotide, e.g., removal, modification or replacement of a terminal phosphate group or conjugation of a moiety, cap or linker (such 3′ or 5′ cap modifications may comprise a sugar and/or backbone modification); and (vii) modification or replacement of the sugar (an exemplary sugar modification).

[0224] Chemical modifications such as those listed above can be combined to provide modified guide RNAs comprising nucleosides and nucleotides (collectively “residues”) that can have two, three, four, or more modifications. For example, a modified residue can have a modified sugar and a modified nucleobase, or a modified sugar and a modified phosphodiester. In some embodiments, every base of a guide RNA is modified, e.g., all bases have a modified phosphate group, such as a phosphorothioate group. In certain embodiments, all, or substantially all, of the phosphate groups of a guide RNA molecule are replaced with phosphorothioate groups. In some embodiments, modified guide RNAs comprise at least one modified residue at or near the 5′ end of the RNA. In some embodiments, modified guide RNAs comprise at least one modified residue at or near the 3′ end of the RNA.

[0225] In some embodiments, the guide RNA comprises one, two, three or more modified residues. In some embodiments, at least 5% (e.g., at least 5%, at least 10%, at least 15%, at least 20%, at least 25%, at least 30%, at least 35%, at least 40%, at least 45%, at least 50%, at least 55%, at least 60%, at least 65%, at least 70%, at least 75%, at least 80%, at least 85%, at least 90%, at least 95%, or 100%) of the positions in a modified guide RNA are modified nucleosides or nucleotides.

[0226] Unmodified nucleic acids can be prone to degradation by, e.g., intracellular nucleases or those found in serum. For example, nucleases can hydrolyze nucleic acid phosphodiester bonds. Accordingly, in one aspect the guide RNAs described herein can contain one or more modified nucleosides or nucleotides, e.g., to introduce stability toward intracellular or serum-based nucleases. In some embodiments, the modified guide RNA molecules described herein can exhibit a reduced innate immune response when introduced into a population of cells, both in vivo and ex vivo. The term “innate immune response” includes a cellular response to exogenous nucleic acids, including single stranded nucleic acids, which involves the induction of cytokine expression and release, particularly the interferons, and cell death.

[0227] In some embodiments of a backbone modification, the phosphate group of a modified residue can be modified by replacing one or more of the oxygens with a different substituent. Further, the modified residue, e.g., modified residue present in a modified nucleic acid, can include the wholesale replacement of an unmodified phosphate moiety with a modified phosphate group as described herein. In some embodiments, the backbone modification of the phosphate backbone can include alterations that result in either an uncharged linker or a charged linker with unsymmetrical charge distribution.

[0228] Examples of modified phosphate groups include, phosphorothioate, phosphoroselenates, borano phosphates, borano phosphate esters, hydrogen phosphonates, phosphoroamidates, alkyl or aryl phosphonates and phosphotriesters. The phosphorous atom in an unmodified phosphate group is achiral. However, replacement of one of the non-bridging oxygens with one of the above atoms or groups of atoms can render the phosphorous atom chiral. The stereogenic phosphorous atom can possess either the “R” configuration (herein Rp) or the “S” configuration (herein Sp). The backbone can also be modified by replacement of a bridging oxygen, (i.e., the oxygen that links the phosphate to the nucleoside), with nitrogen (bridged phosphoroamidates), sulfur (bridged phosphorothioates) and carbon (bridged methylenephosphonates). The replacement can occur at either linking oxygen or at both of the linking oxygens.

[0229] The phosphate group can be replaced by non-phosphorus containing connectors in certain backbone modifications. In some embodiments, the charged phosphate group can be replaced by a neutral moiety. Examples of moieties which can replace the phosphate group can include, without limitation, e.g., methyl phosphonate, hydroxylamino, siloxane, carbonate, carboxymethyl, carbamate, amide, thioether, ethylene oxide linker, sulfonate, sulfonamide, thioformacetal, formacetal, oxime, methyleneimino, methylenemethylimino, methylenehydrazo, methylenedimethylhydrazo and methyleneoxymethylimino.

[0230] Scaffolds that can mimic nucleic acids can also be constructed wherein the phosphate linker and ribose sugar are replaced by nuclease resistant nucleoside or nucleotide surrogates. Such modifications may comprise backbone and sugar modifications. In some embodiments, the nucleobases can be tethered by a surrogate backbone. Examples can include, without limitation, the morpholino, cyclobutyl, pyrrolidine and peptide nucleic acid (PNA) nucleoside surrogates.

[0231] The modified nucleosides and modified nucleotides can include one or more modifications to the sugar group, i.e. at sugar modification. For example, the 2′ hydroxyl group (OH) can be modified, e.g. replaced with a number of different “oxy” or “deoxy” substituents. In some embodiments, modifications to the 2′ hydroxyl group can enhance the stability of the nucleic acid since the hydroxyl can no longer be deprotonated to form a 2′-alkoxide ion.

[0232] Examples of 2′ hydroxyl group modifications can include alkoxy or aryloxy (OR, wherein “R” can be, e.g., alkyl, cycloalkyl, aryl, aralkyl, heteroaryl or a sugar); polyethyleneglycols (PEG), O(CH₂CH₂O)ₙCH₂CH₂OR wherein R can be, e.g., H or optionally substituted alkyl, and n can be an integer from 0 to 20 (e.g., from 0 to 4, from 0 to 8, from 0 to 10, from 0 to 16, from 1 to 4, from 1 to 8, from 1 to 10, from 1 to 16, from 1 to 20, from 2 to 4, from 2 to 8, from 2 to 10, from 2 to 16, from 2 to 20, from 4 to 8, from 4 to 10, from 4 to 16, and from 4 to 20). In some embodiments, the 2′ hydroxyl group modification can be 2′-O-Me. In some embodiments, the 2′ hydroxyl group modification can be a 2′-fluoro modification, which replaces the 2′ hydroxyl group with a fluoride. In some embodiments, the 2′ hydroxyl group modification can include “locked” nucleic acids (LNA) in which the 2′ hydroxyl can be connected, e.g., by a C₁₋₆ alkylene or C₁_₆ heteroalkylene bridge, to the 4′ carbon of the same ribose sugar, where exemplary bridges can include methylene, propylene, ether, or amino bridges; O-amino (wherein amino can be, e.g., NH₂; alkylamino, dialkylamino, heterocyclyl, arylamino, diarylamino, heteroarylamino, or diheteroarylamino, ethylenediamine, or polyamino) and aminoalkoxy, O(CH₂)ₙ-amino, (wherein amino can be, e.g., NH₂; alkylamino, dialkylamino, heterocyclyl, arylamino, diarylamino, heteroarylamino, or diheteroarylamino, ethylenediamine, or polyamino). In some embodiments, the 2′ hydroxyl group modification can include “unlocked” nucleic acids (UNA) in which the ribose ring lacks the C2′-C3′ bond. In some embodiments, the 2′ hydroxyl group modification can include the methoxyethyl group (MOE), (OCH₂CH₂OCH₃, e.g., a PEG derivative).

[0233] “Deoxy” 2′ modifications can include hydrogen (i.e. deoxyribose sugars, e.g., at the overhang portions of partially dsRNA); halo (e.g., bromo, chloro, fluoro, or iodo); amino (wherein amino can be, e.g., NH₂; alkylamino, dialkylamino, heterocyclyl, arylamino, diarylamino, heteroarylamino, diheteroarylamino, or amino acid); NH(CH₂CH₂NH)ₙCH2CH₂— amino (wherein amino can be, e.g., as described herein), —NHC(O)R (wherein R can be, e.g., alkyl, cycloalkyl, aryl, aralkyl, heteroaryl or sugar), cyano; mercapto; alkyl-thio-alkyl; thioalkoxy; and alkyl, cycloalkyl, aryl, alkenyl and alkynyl, which may be optionally substituted with e.g., an amino as described herein.

[0234] The sugar modification can comprise a sugar group which may also contain one or more carbons that possess the opposite stereochemical configuration than that of the corresponding carbon in ribose. Thus, a modified nucleic acid can include nucleotides containing e.g., arabinose, as the sugar. The modified nucleic acids can also include abasic sugars. These abasic sugars can also be further modified at one or more of the constituent sugar atoms. The modified nucleic acids can also include one or more sugars that are in the L form, e.g. L-nucleosides.

[0235] The modified nucleosides and modified nucleotides described herein, which can be incorporated into a modified nucleic acid, can include a modified base, also called a nucleobase. Examples of nucleobases include, but are not limited to, adenine (A), guanine (G), cytosine (C), and uracil (U). These nucleobases can be modified or wholly replaced to provide modified residues that can be incorporated into modified nucleic acids. The nucleobase of the nucleotide can be independently selected from a purine, a pyrimidine, a purine analog, or pyrimidine analog. In some embodiments, the nucleobase can include, for example, naturally-occurring and synthetic derivatives of a base.

[0236] In embodiments employing a dual guide RNA, each of the crRNA and the tracr RNA can contain modifications. Such modifications may be at one or both ends of the crRNA and/or tracr RNA. In embodiments comprising sgRNA, one or more residues at one or both ends of the sgRNA may be chemically modified, and/or internal nucleosides may be modified, and/or the entire sgRNA may be chemically modified. Certain embodiments comprise a 5′ end modification. Certain embodiments comprise a 3′ end modification.

[0237] Modifications of 2′-O-methyl are encompassed.

[0238] Another chemical modification that has been shown to influence nucleotide sugar rings is halogen substitution. For example, 2′-fluoro (2′-F) substitution on nucleotide sugar rings can increase oligonucleotide binding affinity and nuclease stability. Modifications of 2′-fluoro (2′-F) are encompassed.

[0239] Phosphorothioate (PS) linkage or bond refers to a bond where a sulfur is substituted for one nonbridging phosphate oxygen in a phosphodiester linkage, for example in the bonds between nucleotides bases. When phosphorothioates are used to generate oligonucleotides, the modified oligonucleotides may also be referred to as S-oligos.

[0240] Abasic nucleotides refer to those which lack nitrogenous bases.

[0241] Inverted bases refer to those with linkages that are inverted from the normal 5′ to 3′ linkage (i.e., either a 5′ to 5′ linkage or a 3′ to 3′ linkage).

[0242] An abasic nucleotide can be attached with an inverted linkage. For example, an abasic nucleotide may be attached to the terminal 5′ nucleotide via a 5′ to 5′ linkage, or an abasic nucleotide may be attached to the terminal 3′ nucleotide via a 3′ to 3′ linkage. An inverted abasic nucleotide at either the terminal 5′ or 3′ nucleotide may also be called an inverted abasic end cap.

[0243] In some embodiments, one or more of the first three, four, or five nucleotides at the 5′ terminus, and one or more of the last three, four, or five nucleotides at the 3′ terminus are modified. In some embodiments, the modification is a 2′-O-Me, 2′-F, inverted abasic nucleotide, PS bond, or other nucleotide modification well known in the art to increase stability and/or performance.

[0244] In some embodiments, the first four nucleotides at the 5′ terminus, and the last four nucleotides at the 3′ terminus are linked with phosphorothioate (PS) bonds.

[0245] In some embodiments, the first three nucleotides at the 5′ terminus, and the last three nucleotides at the 3′ terminus comprise a 2′-O-methyl (2′-O-Me) modified nucleotide. In some embodiments, the first three nucleotides at the 5′ terminus, and the last three nucleotides at the 3′ terminus comprise a 2′-fluoro (2′-F) modified nucleotide.

### Ribonucleoprotein Complex

[0246] In some embodiments, a composition is encompassed comprising: a) one or more guide RNAs comprising one or more guide sequences from Table 1A (for SaCas9) or Table 1B (for SluCas9) and b) SaCas9 (when combined with a gRNA comprising any one of or combination of SEQ ID Nos: 1000-3081) or SluCas9 (when combined with a gRNA comprising any one of or combination of SEQ ID Nos: 4000-5226), or any of the mutant Cas9 proteins disclosed herein. In some embodiments, the guide RNA together with a Cas9 is called a ribonucleoprotein complex (RNP).

[0247] In some embodiments, the disclosure provides for an RNP complex, wherein the guide RNA (e.g., any of the guide RNAs disclosed herein) binds to or is capable of binding to a target sequence in the dystrophin gene.

[0248] In some embodiments, chimeric Cas9 (SaCas9 or SluCas9) nucleases are used, where one domain or region of the protein is replaced by a portion of a different protein. In some embodiments, a Cas9 nuclease domain may be replaced with a domain from a different nuclease such as Fok1. In some embodiments, a Cas9 nuclease may be a modified nuclease.

[0249] In some embodiments, the Cas9 is modified to contain only one functional nuclease domain. For example, the agent protein may be modified such that one of the nuclease domains is mutated or fully or partially deleted to reduce its nucleic acid cleavage activity.

[0250] In some embodiments, a conserved amino acid within a Cas9 protein nuclease domain is substituted to reduce or alter nuclease activity. In some embodiments, a Cas9 nuclease may comprise an amino acid substitution in the RuvC or RuvC-like nuclease domain. Exemplary amino acid substitutions in the RuvC or RuvC-like nuclease domain include D10A (based on the S. pyogenes Cas9 protein). See, e.g., Zetsche et al. (2015) Cell October 22:163(3): 759-771. In some embodiments, the Cas9 nuclease may comprise an amino acid substitution in the HNH or HNH-like nuclease domain. Exemplary amino acid substitutions in the HNH or HNH-like nuclease domain include E762A, H840A, N863A, H983A, and D986A (based on the S. pyogenes Cas9 protein). See, e.g., Zetsche et al. (2015). Further exemplary amino acid substitutions include D917A, E1006A, and D1255A (based on the Francisella novicida U112 Cpf1 (FnCpf1) sequence (UniProtKB-A0Q7Q2 (CPF1_FRATN)). Further exemplary amino acid substitutions include D10A and N580A (based on the S. aureus Cas9 protein). See, e.g., Friedland et al., 2015, Genome Biol., 16:257.

[0251] In some embodiments, the Cas9 lacks cleavase activity. In some embodiments, the Cas9 comprises a dCas DNA-binding polypeptide. A dCas polypeptide has DNA-binding activity while essentially lacking catalytic (cleavase/nickase) activity. In some embodiments, the dCas polypeptide is a dCas9 polypeptide. In some embodiments, the Cas9 lacking cleavase activity or the dCas DNA-binding polypeptide is a version of a Cas nuclease (e.g., a Cas9 nuclease discussed above) in which its endonucleolytic active sites are inactivated, e.g., by one or more alterations (e.g., point mutations) in its catalytic domains. See, e.g., US 2014/0186958 A1; US 2015/0166980 A1.

[0252] In some embodiments, the Cas9 comprises one or more heterologous functional domains (e.g., is or comprises a fusion polypeptide).

[0253] In some embodiments, the heterologous functional domain may facilitate transport of the Cas9 into the nucleus of a cell. For example, the heterologous functional domain may be a nuclear localization signal (NLS). In some embodiments, the Cas9 may be fused with 1-10 NLS(s). In some embodiments, the Cas9 may be fused with 1-5 NLS(s). In some embodiments, the Cas9 may be fused with 1-3 NLS(s). In some embodiments, the Cas9 may be fused with one NLS. Where one NLS is used, the NLS may be attached at the N-terminus or the C-terminus of the Cas9 sequence, and may be directly fused/attached. In some embodiments, where more than one NLS is used, one or more NLS may be attached at the N-terminus and/or one or more NLS may be attached at the C-terminus. In some embodiments, one or more NLSs are directly attached to the Cas9. In some embodiments, one or more NLSs are attached to the Cas9 by means of a linker. In some embodiments, the linker is between 3-25 amino acids in length. In some embodiments, the linker is between 3-6 amino acids in length. In some embodiments, the linker comprises glycine and serine. In some embodiments, the linker comprises the sequence of GSVD (SEQ ID NO: 550) or GSGS (SEQ ID NO: 551). It may also be inserted within the Cas9 sequence. In other embodiments, the Cas9 may be fused with more than one NLS. In some embodiments, the Cas9 may be fused with 2, 3, 4, or 5 NLSs. In some embodiments, the Cas9 may be fused with two NLSs. In certain circumstances, the two NLSs may be the same (e.g., two SV40 NLSs) or different. In some embodiments, the Cas9 protein is fused with one or more SV40 NLSs. In some embodiments, the SV40 NLS comprises the amino acid sequence of SEQ ID NO: 713 (PKKKRKV). In some embodiments, the Cas9 protein (e.g., the SaCas9 or SluCas9 protein) is fused to one or more nucleoplasmin NLSs. In some embodiments, the Cas protein is fused to one or more c-myc NLSs. In some embodiments, the Cas protein is fused to one or more E1A NLSs. In some embodiments, the Cas protein is fused to one or more BP (bipartite) NLSs. In some embodiments, the nucleoplasmin NLS comprises the amino acid sequence of SEQ ID NO: 714 (KRPAATKKAGQAKKKK). In some embodiments, the Cas9 protein is fused with a c-Myc NLS. In some embodiments, the c-Myc NLS is comprises the amino acid sequence of SEQ ID NO: 942 (PAAKKKKLD) and/or encoded by the nucleic acid sequence of SEQ ID NO: 722 (CCGGCAGCTAAGAAAAAGAAACTGGAT). In some embodiments, the Cas9 is fused to two SV40 NLS sequences linked at the carboxy terminus. In some embodiments, the Cas9 may be fused with two NLSs, one linked at the N-terminus and one at the C-terminus. In some embodiments, the Cas9 may be fused with 3 NLSs. In some embodiments, the Cas9 may be fused with 3 NLSs, two linked at the N-terminus and one linked at the C-terminus. In some embodiments, the Cas9 may be fused with 3 NLSs, one linked at the N-terminus and two linked at the C-terminus. In some embodiments, the Cas9 may be fused with no NLS. In some embodiments, the Cas9 may be fused with one NLS. In some embodiments, the Cas9 may be fused with an NLS on the C-terminus and does not comprise an NLS fused on the N-terminus. In some embodiments, the Cas9 may be fused with an NLS on the N-terminus and does not comprise an NLS fused on the C-terminus. In some embodiments, the Cas9 protein is fused to an SV40 NLS and to a nucleoplasmin NLS. In some embodiments, the Cas9 protein is fused to an SV40 NLS and to a c-Myc NLS. In some embodiments, the SV40 NLS is fused to the C-terminus of the Cas9, while the nucleoplasmin NLS is fused to the N-terminus of the Cas9 protein. In some embodiments, the SV40 NLS is fused to the C-terminus of the Cas9, while the c-Myc NLS is fused to the N-terminus of the Cas9 protein. In some embodiments, the SV40 NLS is fused to the N-terminus of the Cas9, while the nucleoplasmin NLS is fused to the C-terminus of the Cas9 protein. In some embodiments, the SV40 NLS is fused to the N-terminus of the Cas9, while the c-Myc NLS is fused to the C-terminus of the Cas9 protein. In some embodiments, the SV40 NLS is fused to the Cas9 protein by means of a linker. In some embodiments, the SV40 NLS and linker is encoded by the nucleic acid sequence of SEQ ID NO: 723 (ATGATGGCCCCAAAGAAGAAGCGGAAGGTCGGTATCCACGGAGTCCCAGCAGCC). In some embodiments, the nucleoplasmin NLS is fused to the Cas9 protein by means of a linker. In some embodiments, the c-Myc NLS is fused to the Cas9 protein by means of a linker. In some embodiments, an additional domain may be: a) fused to the N- or C-terminus of the Cas protein (e.g., a Cas9 protein), b) fused to the N-terminus of an NLS fused to the N-terminus of a Cas protein, or c) fused to the C-terminus of an NLS fused to the C-terminus of a Cas protein. In some embodiments, an NLS is fused to the N- and/or C-terminus of the Cas protein by means of a linker. In some embodiments, an NLS is fused to the N-terminus of an N-terminally-fused NLS on a Cas protein by means of a linker, and/or an NLS is fused to the C-terminus of a C-terminally fused NLS on a Cas protein by means of a linker. In some embodiments, the linker is GSVD (SEQ ID NO: 550) or GSGS (SEQ ID NO: 551). In some embodiments, the Cas protein comprises a c-Myc NLS fused to the N-terminus of the Cas protein (or to an N-terminally-fused NLS on the Cas protein), optionally by means of a linker. In some embodiments, the Cas protein comprises an SV40 NLS fused to the C-terminus of the Cas protein (or to a C-terminally-fused NLS on the Cas protein), optionally by means of a linker. In some embodiments, the Cas protein comprises a nucleoplasmin NLS fused to the C-terminus of the Cas protein (or to a C-terminally-fused NLS on the Cas protein), optionally by means of a linker. In some embodiments, the Cas protein comprises: a) a c-Myc NLS fused to the N-terminus of the Cas protein, optionally by means of a linker, b) an SV40 NLS fused to the C-terminus of the Cas protein, optionally by means of a linker, and c) a nucleoplasmin NLS fused to the C-terminus of the SV40 NLS, optionally by means of a linker. In some embodiments, the Cas protein comprises: a) a c-Myc NLS fused to the N-terminus of the Cas protein, optionally by means of a linker, b) a nucleoplasmin NLS fused to the C-terminus of the Cas protein, optionally by means of a linker, and c) an SV40 NLS fused to the C-terminus of the nucleoplasmin NLS, optionally by means of a linker. In some embodiments, a c-myc NLS is fused to the N-terminus of the Cas9 and an SV40 NLS and/or nucleoplasmin NLS is fused to the C-terminus of the Cas9. In some embodiments, a c-myc NLS is fused to the N-terminus of the Cas9 (e.g., by means of a linker such as GSVD), an SV40 NLS is fused to the C-terminus of the Cas9 (e.g., by means of a linker such as GSGS), and a nucleoplasmin NLS is fused to the C-terminus of the SV-40 NLS (e.g., by means of a linker such as GSGS).

[0254] In some embodiments, the heterologous functional domain may be capable of modifying the intracellular half-life of the Cas9. In some embodiments, the half-life of the Cas9 may be increased. In some embodiments, the half-life of the Cas9 may be reduced. In some embodiments, the heterologous functional domain may be capable of increasing the stability of the Cas9. In some embodiments, the heterologous functional domain may be capable of reducing the stability of the Cas9. In some embodiments, the heterologous functional domain may act as a signal peptide for protein degradation. In some embodiments, the protein degradation may be mediated by proteolytic enzymes, such as, for example, proteasomes, lysosomal proteases, or calpain proteases. In some embodiments, the heterologous functional domain may comprise a PEST sequence. In some embodiments, the Cas9 may be modified by addition of ubiquitin or a polyubiquitin chain. In some embodiments, the ubiquitin may be a ubiquitin-like protein (UBL). Non-limiting examples of ubiquitin-like proteins include small ubiquitin-like modifier (SUMO), ubiquitin cross-reactive protein (UCRP, also known as interferon-stimulated gene-15 (ISG15)), ubiquitin-related modifier-1 (URM1), neuronal-precursor-cell-expressed developmentally downregulated protein-8 (NEDD8, also called Rub1 in S. cerevisiae), human leukocyte antigen F-associated (FAT10), autophagy-8 (ATG8) and -12 (ATG12), Fau ubiquitin-like protein (FUB1), membrane-anchored UBL (MUB), ubiquitin fold-modifier-1 (UFM1), and ubiquitin-like protein-5 (UBL5).

[0255] In some embodiments, the heterologous functional domain may be a marker domain. Non-limiting examples of marker domains include fluorescent proteins, purification tags, epitope tags, and reporter gene sequences. In some embodiments, the marker domain may be a fluorescent protein. Non-limiting examples of suitable fluorescent proteins include green fluorescent proteins (e.g., GFP, GFP-2, tagGFP, turboGFP, sfGFP, EGFP, Emerald, Azami Green, Monomeric Azami Green, CopGFP, AceGFP, ZsGreen1), yellow fluorescent proteins (e.g., YFP, EYFP, Citrine, Venus, YPet, PhiYFP, ZsYellow1), blue fluorescent proteins (e.g., EBFP, EBFP2, Azurite, mKalamal, GFPuv, Sapphire, T-sapphire), cyan fluorescent proteins (e.g., ECFP, Cerulean, CyPet, AmCyan1, Midoriishi-Cyan), red fluorescent proteins (e.g., mKate, mKate2, mPlum, DsRed monomer, mCherry, mRFP1, DsRed-Express, DsRed2, DsRed-Monomer, HcRed-Tandem, HcRed1, AsRed2, eqFP611, mRasberry, mStrawberry, Jred), and orange fluorescent proteins (mOrange, mKO, Kusabira-Orange, Monomeric Kusabira-Orange, mTangerine, tdTomato) or any other suitable fluorescent protein. In other embodiments, the marker domain may be a purification tag and/or an epitope tag. Non-limiting exemplary tags include glutathione-S-transferase (GST), chitin binding protein (CBP), maltose binding protein (MBP), thioredoxin (TRX), poly(NANP), tandem affinity purification (TAP) tag, myc, AcV5, AU1, AU5, E, ECS, E2, FLAG, HA, nus, Softag 1, Softag 3, Strep, SBP, Glu-Glu, HSV, KT3, S, S1, T7, V5, VSV-G, 6×His, 8×His, biotin carboxyl carrier protein (BCCP), poly-His, and calmodulin. Non-limiting exemplary reporter genes include glutathione-S-transferase (GST), horseradish peroxidase (HRP), chloramphenicol acetyltransferase (CAT), beta-galactosidase, beta-glucuronidase, luciferase, or fluorescent proteins.

[0256] In additional embodiments, the heterologous functional domain may target the Cas9 to a specific organelle, cell type, tissue, or organ. In some embodiments, the heterologous functional domain may target the Cas9 to muscle.

[0257] In further embodiments, the heterologous functional domain may be an effector domain. When the Cas9 is directed to its target sequence, e.g., when a Cas9 is directed to a target sequence by a guide RNA, the effector domain may modify or affect the target sequence. In some embodiments, the effector domain may be chosen from a nucleic acid binding domain or a nuclease domain (e.g., a non-Cas nuclease domain). In some embodiments, the heterologous functional domain is a nuclease, such as a FokI nuclease. See, e.g., U.S. Pat. No. 9,023,649.

[0258] In some embodiments, any of the compositions disclosed herein comprising any of the guides and/or endonucleases disclosed herein is sterile and/or substantially pyrogen-free. In particular embodiments, any of the compositions disclosed herein comprise a pharmaceutically acceptable carrier. The phrase “pharmaceutically or pharmacologically acceptable” refers to molecular entities and compositions that do not produce an adverse, allergic, or other untoward reaction when administered to an animal or human. As used herein “pharmaceutically acceptable carrier” includes any and all solvents (e.g., water), dispersion media, coatings, antibacterial and antifungal agents, isotonic and absorption delaying agents, and the like that are physiologically compatible, including pharmaceutically acceptable cell culture media. Pharmaceutically acceptable carriers include sterile aqueous solutions or dispersions and sterile powders for the extemporaneous preparation of sterile injectable solutions or dispersion. In some embodiments, the composition comprises a preservative to prevent the growth of microorganisms.

### Determination of Efficacy of Guide RNAs

[0259] In some embodiments, the efficacy of a guide RNA is determined when delivered or expressed together with other components forming an RNP. In some embodiments, the guide RNA is expressed together with a SaCas9 or SluCas9. In some embodiments, the guide RNA is delivered to or expressed in a cell line that already stably expresses an SaCas9 or SluCas9. In some embodiments the guide RNA is delivered to a cell as part of an RNP. In some embodiments, the guide RNA is delivered to a cell along with a nucleic acid (e.g., mRNA) encoding SaCas9 or SluCas9.

[0260] In some embodiments, the efficacy of particular guide RNAs is determined based on in vitro models. In some embodiments, the in vitro model is a cell line.

[0261] In some embodiments, the efficacy of particular guide RNAs is determined across multiple in vitro cell models for a guide RNA selection process. In some embodiments, a cell line comparison of data with selected guide RNAs is performed. In some embodiments, cross screening in multiple cell models is performed.

[0262] In some embodiments, the efficacy of particular guide RNAs is determined based on in vivo models. In some embodiments, the in vivo model is a rodent model. In some embodiments, the rodent model is a mouse which expresses a mutated dystrophin gene. In some embodiments, the in vivo model is a non-human primate, for example cynomolgus monkey.

### III. Methods of Gene Editing and Treating DMD

[0263] This disclosure provides methods for gene editing and treating Duchenne Muscular Dystrophy (DMD). In some embodiments, any of the compositions described herein may be administered to a subject in need thereof for use in making a double or single strand break, or excising a portion (e.g., less than about 250 nucleotides) in any one or more of exons 1, 2, 3, 4, 5, 6, 7, 8, 9, 10, 11, 12, 13, 14, 15, 16, 17, 18, 19, 20, 21, 22, 23, 24, 25, 26, 27, 28, 29, 30, 31, 32, 33, 34, 35, 36, 37, 38, 39, 40, 41, 42, 43, 46, 47, 48, 49, 52, 54, 55, 56, 57, 58, 59, 60, 61, 62, 63, 64, 65, 66, 67, 68, 69, 70, 71, 72, 73, 74, 75, 76, 77, 78, or 79 of the dystrophin (DMD) gene and to treat DMD. In some embodiments, pairs of guide RNAs described herein, in any of the vector configurations described herein, may be administered to a subject in need thereof to make a single or double-strand break, excise a portion of a DMD exon, and treat DMD. In some embodiments, any of the compositions described herein may be administered to a subject in need thereof for use in treating DMD. In some embodiments, a nucleic acid molecule comprising a first nucleic acid encoding one or more guide RNAs of Table 1A (for SaCas9) or Table 1B (for SluCas9) and a second nucleic acid encoding either SaCas9 or SluCas9 (depending on the guide) is administered to a subject to treat DMD. In some embodiments, a single nucleic acid molecule (which may be a vector, including an AAV vector) comprising a first nucleic acid encoding one or more guide RNAs of Table 1A (for SaCas9) or Table 1B (for SluCas9) and a second nucleic acid encoding either SaCas9 or SluCas9 (depending on the guide) is administered to a subject to treat DMD. In some embodiments, more than one nucleic acid molecules (which may be a vectors, including an AAV vectors) are administered to a subject to treat DMD, wherein a first nucleic acid encoding one or more guide RNAs of Table 1A (for SaCas9) or Table 1B (for SluCas9) and a second nucleic acid encoding either SaCas9 or SluCas9 (depending on the guide) are together on one nucleic acid molecule or separated on different nucleic acid molecules.

[0264] In some embodiments, any of the compositions described herein is administered to a subject in need thereof to treat Duchenne Muscular Dystrophy (DMD).

[0265] In some embodiments, any of the compositions described herein is administered to a subject in need thereof to induce a double or single strand break in any one or more of exons 1, 2, 3, 4, 5, 6, 7, 8, 9, 10, 11, 12, 13, 14, 15, 16, 17, 18, 19, 20, 21, 22, 23, 24, 25, 26, 27, 28, 29, 30, 31, 32, 33, 34, 35, 36, 37, 38, 39, 40, 41, 42, 43, 46, 47, 48, 49, 52, 54, 55, 56, 57, 58, 59, 60, 61, 62, 63, 64, 65, 66, 67, 68, 69, 70, 71, 72, 73, 74, 75, 76, 77, 78, or 79 of the dystrophin gene.

[0266] In some embodiments, any of the compositions described herein is administered to a subject in need thereof to delete a portion (e.g., excise a portion) any one of exons 1, 2, 3, 4, 5, 6, 7, 8, 9, 10, 11, 12, 13, 14, 15, 16, 17, 18, 19, 20, 21, 22, 23, 24, 25, 26, 27, 28, 29, 30, 31, 32, 33, 34, 35, 36, 37, 38, 39, 40, 41, 42, 43, 46, 47, 48, 49, 52, 54, 55, 56, 57, 58, 59, 60, 61, 62, 63, 64, 65, 66, 67, 68, 69, 70, 71, 72, 73, 74, 75, 76, 77, 78, or 79 of the dystrophin gene. In some embodiments, any of the compositions described herein is administered to a subject to induce multiple double-strand breaks in a single exon (e.g., by administering two different guides that target two different regions in the same exon).

[0267] In some embodiments, a method of treating Duchenne Muscular Dystrophy (DMD) is provided, the method comprising delivering to a cell any one of the compositions described herein, wherein the cell comprises a mutation in the dystrophin gene that is known to be associated with DMD.

[0268] In some embodiments, methods are provided for treating Duchenne Muscular Dystrophy (DMD), the method comprising delivering to a cell at least one nucleic acid molecule comprising a pair of guide RNAs comprising a first and second spacer sequence, wherein the first and spacer sequences are selected from any two spacer sequences of Table 1A (SEQ ID NOs: 1000-3081); and a nucleic acid encoding a Staphylococcus aureus Cas9 (SaCas9), wherein the nucleic acid encoding the SaCas9 may be on the same or different nucleic acid molecule as the pair of guide RNAs.

[0269] In some embodiments, methods are provided for treating Duchenne Muscular Dystrophy (DMD), the method comprising delivering to a cell at least one nucleic acid molecule comprising a pair of guide RNAs comprising a first and second spacer sequence, wherein the first and spacer sequences are selected from any two spacer sequences of Table 1B (SEQ ID NOs: 4000-5226); and a nucleic acid encoding a Staphylococcus lugdunensis (SluCas9), wherein the nucleic acid encoding the SluCas9 may be on the same or different nucleic acid molecule as the pair of guide RNAs.

[0270] In some embodiments, a method for treating DMD is provided comprising administering a composition comprising one or more guide RNAs wherein each guide RNA comprises a guide sequence of Table 1A or Table 1B, or comprises a guide sequence comprising at least 16, 17, 18, 19, or 20 contiguous nucleotides of a guide sequence of Table 1A or Table 1B, or is at least 90% identical to guide sequence selected from Table 1A or Table 1B. In each instance, the composition may comprise a nucleic acid encoding the guide RNA(s). In some embodiments, a method for treating DMD is provided comprising administering a composition comprising one or more nucleic acid molecules encoding one or more guide RNAs, wherein each guide RNA comprises a guide sequence of Table 1A or Table 1B, or at least 16, 17, 18, 19, or 20 contiguous nucleotides of a guide sequence of Table 1A or Table 1B, or is at least 90% identical to guide sequence selected from Table 1A or Table 1B. In some embodiments, the method comprises treating DMD by administering at least two guide RNAs and an endonuclease (or a nucleic acid encoding an endonuclease), wherein the at least two guide RNAs target the same exon. In some embodiments, the method comprises treating DMD by administering at least two guide RNAs and an endonuclease (or a nucleic acid encoding an endonuclease), wherein the at least two guide RNAs target different sites in the same exon.

[0271] In some embodiments, a method for treating DMD is provided comprising administering a composition comprising a guide RNA wherein the guide RNA comprises a guide sequence of Table 1A or Table 1B, or at least 16, 17, 18, 19, or 20 contiguous nucleotides of a guide sequence of Table 1A or Table 1B, or is at least 90% identical to guide sequence of Table 1A or Table 1B. In each instance, the composition may comprise a nucleic acid encoding the guide RNA.

[0272] In some embodiments, a method for treating DMD is provided comprising administering a composition comprising a guide RNA comprising no more than 16, no more than 17, no more than 18, no more than 19, no more than 20, no more than 21, or no more than 22 contiguous nucleotides of a guide sequence of Tables 1A-B, or is at least 90% identical to no more than 16, no more than 17, no more than 18, no more than 19, no more than 20, no more than 21, or no more than 22 contiguous nucleotides of a guide sequence of Tables 1A-B. In each instance, the composition may comprise a nucleic acid encoding the guide RNA.

[0273] In some embodiments, a method for treating DMD is provided comprising administering a composition comprising two or more guide RNAs wherein each guide RNA comprises a guide sequence of Table 1A or Table 1B, or at least 16, 17, 18, 19, or 20 contiguous nucleotides of a guide sequence of Table 1A or Table 1B, or is at least 90% identical to guide sequence selected from Table 1A or Table 1B. In each instance, the composition may comprise a nucleic acid encoding the guide RNA.

[0274] In some embodiments, a method for treating DMD is provided comprising administering a composition comprising two or more guide RNAs wherein at least one of the two or more guide RNAs, optionally each guide RNA, comprises no more than 16, no more than 17, no more than 18, no more than 19, no more than 20, no more than 21, or no more than 22 contiguous nucleotides of a guide sequence of Tables 1A-B, is at least 90% identical to no more than 16, no more than 17, no more than 18, no more than 19, no more than 20, no more than 21, or no more than 22 contiguous nucleotides of a guide sequence selected from Tables 1A-B. In each instance, the composition may comprise a nucleic acid encoding the guide RNA.

[0275] In some embodiments, a method for treating DMD is provided comprising administering a composition comprising a SaCas9 or SluCas9 or one or more nucleic acid molecules encoding a SaCas9 or SluCas9 and a pair of guide RNAs comprising a first guide sequence and a second guide sequence, wherein the first and second guide sequence are selected from any two guide sequences selected from i) SEQ ID NOs: 1000-1353 (for SaCas9); ii) SEQ ID NOs: 1354-3081 (for SaCas9-KKH); and iii) SEQ ID NOs: 4000-5226 (for SluCas9). In some embodiments, the first and second guide sequences target the same exon. In some embodiments, the first and second guide sequences target different sites in the same exon.

[0276] In some embodiments, a method for treating DMD is provided comprising administering a composition comprising a Cas protein or a nucleic acid encoding a Cas protein and a pair of guide RNAs, wherein the pair of guide RNAs comprise any two of the SaCas9 guide sequences provided in Table 1A or any two of the SluCas9 guide sequences provided in Table 1B. In some embodiments, the two or more guide sequences target the same exon. In some embodiments, the two or more guide sequences target different sites in the same exon.

[0277] In some embodiments, a method for treating DMD is provided comprising administering a Cas protein or a nucleic acid encoding a Cas protein and a composition comprising one or more nucleic acid molecules encoding a pair of guide RNAs, wherein the pair of guide RNAs comprise any two guide sequences selected from i) SEQ ID NOs: 1000-1353 (for SaCas9); ii) SEQ ID NOs: 1354-3081 (for SaCas9-KKH); and iii) SEQ ID NOs: 4000-5226 (for SluCas9). In some embodiments, the two or more guide sequences target the same exon. In some embodiments, the two or more guide sequences target different sites in the same exon.

[0278] In some embodiments, a method for treating DMD further comprises administering a nucleic acid encoding an endonuclease. The appropriate endonuclease for use with each of the guide RNAs is provided herein, for example, in Table 1A and Table 1B, column “enzyme.”

[0279] In some embodiments, the subject is a mammal. In some embodiments, the subject is human.

[0280] For treatment of a subject (e.g., a human), any of the compositions disclosed herein may be administered in a manner compatible with the dosage formulation and in such amount as is therapeutically effective. The compositions may be readily administered in a variety of dosage forms, such as injectable solutions. For parenteral administration in an aqueous solution, for example, the solution will generally be suitably buffered and the liquid diluent first rendered isotonic with, for example, sufficient saline or glucose. Such aqueous solutions may be used, for example, for intravenous, intramuscular, subcutaneous, and/or intraperitoneal administration.

### Combination Therapy

[0281] In some embodiments, the invention comprises combination therapies comprising any of the methods or uses described herein together with an additional therapy suitable for ameliorating DMD.

### Delivery of Guide RNA Compositions

[0282] The methods and uses disclosed herein may use any suitable approach for delivering the guide RNAs and compositions described herein. Exemplary delivery approaches include vectors, such as viral vectors; lipid nanoparticles; transfection; and electroporation. In some embodiments, vectors or LNPs associated with the single-vector guide RNAs/Cas9's disclosed herein are for use in preparing a medicament for treating DMD.

[0283] Lipid nanoparticles (LNPs) are a known means for delivery of nucleotide and protein cargo, and may be used for delivery of the guide RNAs, compositions, or pharmaceutical formulations disclosed herein. In some embodiments, the LNPs deliver nucleic acid, protein, or nucleic acid together with protein.

[0284] Electroporation is a well-known means for delivery of cargo, and any electroporation methodology may be used for delivering the single vectors disclosed herein.

[0285] In some embodiments, the invention comprises a method for delivering any one of the single vectors disclosed herein to an ex vivo cell, wherein the guide RNA is encoded by a vector, associated with an LNP, or in aqueous solution. In some embodiments, the guide RNA/LNP or guide RNA is also associated with a Cas9 or sequence encoding Cas9 (e.g., in the same vector, LNP, or solution).

[0286] In some embodiments, the disclosure provides for methods of using any of the guides, endonucleases, cells, or compositions disclosed herein in research methods. For example, any of the guides or endonucleases disclosed herein may be used alone or in combination in experiments under various parameters (e.g., temperatures, pH, types of cells) or combined with other reagents to evaluate the activity of the guides and/or endonucleases.

### EXAMPLES

[0287] The following examples are provided to illustrate certain disclosed embodiments and are not to be construed as limiting the scope of this disclosure in any way.

### Example 1: Exemplary DMD sgRNAs

[0288] Guide RNA comprising the guide sequences shown in Table 1A and Table 1B are prepared according to standard methods in a single guide (sgRNA) format. A single AAV vector, or two AAV vectors, is/are prepared that expresses one or more of the guide RNAs and a SaCas9 (for guide sequences having SEQ ID NOs: 1000-3081) or SluCas9 (for guide sequences having SEQ ID NOs: 4000-5226). The AAV vector is administered to cells in vitro to assess the ability of the AAV to express the guide RNA and Cas9, edit the targeted exon (see Tables 1A-B), and thereby treat DMD.

### Example 2: Evaluation of sgRNA Pairs

### A. Materials and Methods

### 1. sgRNA Selection

[0289] A subset of SaCas9-KKH or SluCas9 sgRNAs found within the DMD gene is selected for indel frequency and profile evaluation. The selected sgRNAs for pair evaluation are selected from Tables 1A-B and are prepared according to standard methods. The criteria used to select these sgRNAs included their potential to induce exon refraining and or skipping as a pair, in addition to the existence of a mouse, dog and NHP homologue counterpart. This selection includes sgRNAs located within exons 1, 2, 3, 4, 5, 6, 7, 8, 9, 10, 11, 12, 13, 14, 15, 16, 17, 18, 19, 20, 21, 22, 23, 24, 25, 26, 27, 28, 29, 30, 31, 32, 33, 34, 35, 36, 37, 38, 39, 40, 41, 42, 43, 46, 47, 48, 49, 52, 54, 55, 56, 57, 58, 59, 60, 61, 62, 63, 64, 65, 66, 67, 68, 69, 70, 71, 72, 73, 74, 75, 76, 77, 78, or 79. The number of predicted off target sites is determined for each sgRNA. The pair of sgRNAs selected from Tables 1A and 1B are selected such that the pair of sgRNAs target different sites in the same exon.

### 2. Transfection of HEK293FT Cells

[0290] To evaluate indel frequency and profile, human HEK293FT cell line is used. HEK293FT cells are transfected in 12-well plates with 750 ng plasmid+2.5 μL of Lipofectamine 2000. Three days after transfection, cells are trypsinized and sorted for green fluorescent protein (GFP). GFP-positive cells are sorted directly into lysis buffer, and DNA extraction is performed using the GeneJet Genomic DNA Purification Kit. PCR is then performed on the genomic DNA using DMD exon-specific primers that targeted the relevant cut site.

### 3. Amplicon Deep Sequencing Library Preparation and Data Analysis

[0291] Exons are amplified by PCR and the products are used to prepare sequencing libraries using MiSeq reagent kit V3. Indel analysis was performed using CRISPResso2±10-nt quantification window. (See, e.g., Clement et al., Nat Biotechnol. 2019 March; 37(3):224-226). Indel profiling consists of six mutually exclusive indel categories, described below:
[0292] NE: non-edited;
[0293] Precise deletion (i.e. CleanCut);
[0294] RF.+1 (i.e. +1 bp): 1-nucleotide (nt) insertion leading to reframe;
[0295] RF.Other (i.e. Reframe): indels other than 1-nt insertion leading to reframe:
[0296] Deletion: not extending outside of the refraining window
[0297] Insertion: <17-nt (i.e., <6 amino acids);
[0298] Exon skipping: indels that disrupt the ±6-nt window of the exon/intron boundaries leading to potential exon skipping (outcome requiring validation):
[0299] The indel has >=9-nt overlap with the splicing window (to disrupt the GT/AG splicing sites)
[0300] OE: Other indels.

### 4. AAV Configurations for the Dual Cut Single Vector Candidates

[0301] A combination of promoter orientations, promoter configurations, NLSs and scaffolds are selected for generating AAV plasmids and evaluation on sgRNA transgene expression, AAV manufacturability, and editing efficiency in vitro and in vivo. AAV plasmid configurations are listed in Table 4.

TABLE 4

| Pol III | | | | | | | |
|---|---|---|---|---|---|---|---|
| Promoter | Orientation | Configuration | NLS1 | Endonuclease | NLS2 | NLS3 | Scaffold |
| hU6c:hU6c | ← ⇒ → | hU6c-Cas9- | c-Myc- | SluCas9 | SV-40-GSGS | Nucleoplasmin- | V5 |
| | | hU6c | GSVD | | | GSGS | |
| | ← ⇒ → | hU6c-Cas9- | c-Myc- | SaCas9-KKH | SV-40-GSGS | Nucleoplasmin- | V2 |
| | | hU6c | GSVD | | | GSGS | |
| | ← ⇒ → | hU6c-Cas9- | c-Myc- | SluCas9 | SV-40-MCS- | Nucleoplasmin- | V5 |
| | | hU6c | GSVD | | GSGS | GSGS | |
| | ← ⇒ → | hU6c-Cas9- | c-Myc- | SaCas9-KKH | SV-40-MCS- | Nucleoplasmin- | V2 |
| | | hU6c | GSVD | | GSGS | GSGS | |
| hU6:7SK2 | ← ⇒ → | hU6c-Cas9- | c-Myc- | SluCas9 | SV-40-GSGS | Nucleoplasmin- | V5 |
| | | 7SK2 | GSVD | | | GSGS | |
| | ← ⇒ → | hU6c-Cas9- | c-Myc- | SaCas9-KKH | SV-40-GSGS | Nucleoplasmin- | V2 |
| | | 7SK2 | GSVD | | | GSGS | |
| | ← ⇒ → | hU6c-Cas9- | c-Myc- | SluCas9 | SV-40-MCS- | Nucleoplasmin- | V5 |
| | | 7SK2 | GSVD | | GSGS | GSGS | |
| | ← ⇒ → | hU6c-Cas9- | c-Myc- | SaCas9-KKH | SV-40-MCS- | Nucleoplasmin- | V2 |
| | | 7SK2 | GSVD | | GSGS | GSGS | |
| hU6c:H1m | ← ⇒ → | hU6c-Cas9- | c-Myc- | SluCas9 | SV-40-GSGS | Nucleoplasmin- | V5 |
| | | H1m | GSVD | | | GSGS | |
| | ← ⇒ → | hU6c-Cas9- | c-Myc- | SaCas9-KKH | SV-40-GSGS | Nucleoplasmin- | V2 |
| | | H1m | GSVD | | | GSGS | |
| 7SK2:H1m | ← ⇒ → | 7SK2-Cas9- | SV-40-GS | SluCas9 | Nucleoplasmin | N/A | V5 |
| | | H1m | | | | | |
| | ← ⇒ → | 7SK2-Cas9- | SV-40-GS | SaCas9-KKH | Nucleoplasmin | N/A | V2 |
| | | H1m | | | | | |
| | ← ⇒ → | 7SK2-Cas9- | SV-40 (+) | SluCas9 | Nucleoplasmin | N/A | V5 |
| | | H1m | | | | | |
| | ← ⇒ → | 7SK2-Cas9- | SV-40 (+) | SaCas9-KKH | Nucleoplasmin | N/A | V2 |
| | | H1m | | | | | |
| | ← ⇒ → | 7SK2-Cas9- | c-Myc- | SluCas9 | SV-40-MCS- | Nucleoplasmin- | V5 |
| | | H1m | GSVD | | GSGS | GSGS | |
| | ← ⇒ → | 7SK2-Cas9- | c-Myc- | SaCas9-KKH | SV-40-MCS | Nucleoplasmin- | V2 |
| | | H1m | GSVD | | GSGS | GSGS | |
| | ← ⇒ → | 7SK2-Cas9- | c-Myc- | SluCas9 | SV-40-MCS | Nucleoplasmin- | V2 |
| | | H1m | GSVD | | GSGS | GSGS | |
| H1m:M11 | ← ⇒ → | H1m-Cas9- | c-Myc- | SluCas9 | SV-40-MCS- | Nucleoplasmin- | V5 |
| | | M11 | GSVD | | GSGS | GSGS | |
| | ← ⇒ → | Hlm-Cas9- | c-Myc- | SaCas9-KKH | SV-40-MCS- | Nucleoplasmin- | V5 |
| | | M11 | GSVD | | GSGS | GSGS | |

[0302] This description and exemplary embodiments should not be taken as limiting. For the purposes of this specification and appended claims, unless otherwise indicated, all numbers expressing quantities, percentages, or proportions, and other numerical values used in the specification and claims, are to be understood as being modified in all instances by the term “about,” to the extent they are not already so modified. Accordingly, unless indicated to the contrary, the numerical parameters set forth in the following specification and attached claims are approximations that may vary depending upon the desired properties sought to be obtained. At the very least, and not as an attempt to limit the application of the doctrine of equivalents to the scope of the claims, each numerical parameter should at least be construed in light of the number of reported significant digits and by applying ordinary rounding techniques.

[0303] It is noted that, as used in this specification and the appended claims, the singular forms “a,” “an,” and “the,” and any singular use of any word, include plural referents unless expressly and unequivocally limited to one referent. As used herein, the term “include” and its grammatical variants are intended to be non-limiting, such that recitation of items in a list is not to the exclusion of other like items that can be substituted or added to the listed items.

What is claimed is:

1. A composition comprising one or more guide RNAs or a nucleic acid encoding one or more guide RNAs, wherein the one or more guide RNAs comprise i) a guide sequence of Table 1A or Table 1B; ii) at least 16, 17, 18, 19, or 20 contiguous nucleotides of a guide sequence of Table 1A or Table 1B; iii) a guide sequence that is at least 90% identical to a guide sequence of Table 1A or Table 1B; optionally further comprising a SaCas9 or a nucleic acid encoding a SaCas9 (for SEQ ID NOs: 1000-3081 in Table 1A) or a SluCas9 or a nucleic acid encoding a SluCas9 (for SEQ ID NOs 4000-5226 in Table 1B).

2. A composition comprising a pair of guide RNAs or a nucleic acid encoding the pair of guide RNAs, wherein the pair of guide RNAs comprise a first and a second guide RNA, wherein the first and the second guide RNAs are selected from any two guide RNAs of Table 1A or any two guide RNAs of Table 1B.

3. A composition comprising: one or more nucleic acid molecules encoding
a. a SaCas9 or SluCas9; and
b. a first guide RNA and a second guide RNA, wherein the first and second guide RNAs are selected from any two guide RNAs of Table 1A or any two guide RNAs of Table 1B.

4. A composition comprising:
a. a single nucleic acid molecule comprising:
i. a nucleic acid encoding Staphylococcus aureus Cas9 (SaCas9) or Staphylococcus lugdunensis (SluCas9) and at least one, at least two, or at least three guide RNAs; or
ii. a nucleic acid encoding Staphylococcus aureus Cas9 (SaCas9) or Staphylococcus lugdunensis (SluCas9) and from one to n guide RNAs, wherein n is no more than the maximum number of guide RNAs that can be expressed from said nucleic acid; or
iii. a nucleic acid encoding Staphylococcus aureus Cas9 (SaCas9) or Staphylococcus lugdunensis (SluCas9) and 1, 2, or 3 guide RNAs;
wherein each guide RNA comprises at least one guide sequence of Table 1A or Table 1B; or
b. two nucleic acid molecules comprising:
i. a first nucleic acid encoding Staphylococcus aureus Cas9 (SaCas9) or Staphylococcus lugdunensis (SluCas9); and
a second nucleic acid that does not encode a SaCas9 or SluCas9 and encodes any one of the following:
1. at least one, at least two, at least three, at least four, at least five, or at least six guide RNAs; or
2. from one to n guide RNAs, wherein n is no more than the maximum number of guide RNAs that can be expressed from said nucleic acid; or
3. from one to six guide RNAs; or
ii. a first nucleic acid encoding Staphylococcus aureus Cas9 (SaCas9) or Staphylococcus lugdunensis (SluCas9) and
1. at least one, at least two, or at least three guide RNAs; or
2. from one to n guide RNAs, wherein n is no more than the maximum number of guide RNAs that can be expressed from said nucleic acid; or
3. 1, 2, or 3 guide RNAs; and
a second nucleic acid that does not encode a SaCas9 or SluCas9, optionally wherein the second nucleic acid comprises any one of the following:
1. at least one, at least two, at least three, at least four, at least five, or at least six guide RNAs; or
2. from one to n guide RNAs, wherein n is no more than the maximum number of guide RNAs that can be expressed from said nucleic acid; or
3. from one to six guide RNAs; or
iii. a first nucleic acid encoding Staphylococcus aureus Cas9 (SaCas9) or Staphylococcus lugdunensis (SluCas9) and at least one, at least two, or at least three guide RNAs; and
a second nucleic acid that does not encode a SaCas9 or SluCas9 and encodes from one to six guide RNAs; or
iv. a first nucleic acid encoding Staphylococcus aureus Cas9 (SaCas9) or Staphylococcus lugdunensis (SluCas9) and at least two guide RNAs, wherein a first guide RNA of the at least two guide RNAs binds upstream of a target sequence and a second guide RNA of the at least two guide RNAs binds downstream of the target sequence; and
a second nucleic acid that does not encode a SaCas9 or SluCas9 and encodes at least one additional copy of each of the guide RNAs encoded in the first nucleic acid;
wherein each guide RNA comprises at least one guide sequence of Table 1A (for SaCas9) or Table 1B (for SluCas9).

5. The composition of any one of claims 1-4, comprising a pair of guide RNAs, wherein the pair of guide RNAs is capable of excising a DNA fragment from the DMD gene; wherein the DNA fragment is between 5-250 nucleotides in length.

6. The composition of claim 5, wherein the excised DNA fragment does not comprise an entire exon of the DMD gene.

7. A composition comprising a single nucleic acid molecule encoding a pair of guide RNAs and a Cas9, wherein the single nucleic acid molecule comprises:
a. a first nucleic acid encoding the pair of guide RNAs, wherein the pair of guide RNAs comprises any two guide RNAs of SEQ ID NOs: 1000-3081; and a second nucleic acid encoding a Staphylococcus aureus Cas9 (SaCas9); or
b. a first nucleic acid encoding a pair of guide RNAs, wherein the pair of guide RNAs comprises any two guide RNAs of SEQ ID NOs: 4000-5226; and a second nucleic acid encoding a Staphylococcus lugdunensis (SluCas9).

8. A composition comprising one or more nucleic acid molecules encoding a Staphylococcus aureus Cas9 (SaCas9) and a first and a second guide RNA, wherein the first and the second guide RNA target different sequences in a DMD gene, wherein the first guide RNA comprises a sequence that is at least 90% identical to a first sequence selected from a guide RNA sequence of Table 1A, and the second guide RNA comprises a sequence that is at least 90% identical to a second sequence selected from a guide RNA sequence of Table 1A.

9. A composition comprising one or more nucleic acid molecules encoding a Staphylococcus lugdunensis (SluCas9) and a first and a second guide RNA, wherein the first and second guide RNA target different sequences in a DMD gene, wherein the first guide RNA comprises a sequence that is at least 90% identical to a first sequence selected from a guide RNA sequence of Table 1B, and the second guide RNA comprises a sequence that is at least 90% identical to a second sequence selected from a guide RNA sequence of Table 1B.

10. The composition of any one of claims 5-9, comprising at least two guide RNAs, wherein once expressed in vitro or in vivo in combination with an RNA-guided endonuclease, the guide RNAs excise a portion of the exon, wherein the size of the excised portion of the exon is between 5 and 250 nucleotides in length.

11. The composition of any one of the preceding claims, comprising at least two guide RNAs, wherein once expressed in vitro or in vivo in combination with an RNA-guided endonuclease, the at least two guide RNAs excise a portion of the DNA fragment from the DMD gene, wherein the size of the excised portion of the DNA fragment from the DMD gene is between 5 and 250, 5 and 200, 5 and 150, 5 and 100, 5 and 75, 5 and 50, 5 and 25, 5 and 10, 20 and 250, 20 and 200, 20 and 150, 20 and 100, 20 and 75, 20 and 50, 20 and 25, 50 and 250, 50 and 200, 50 and 150, 50 and 100, and 50 and 75 nucleotides.

12. The composition of any one of claims 5-11, comprising at least two guide RNAs, wherein once expressed in vitro or in vivo in combination with an RNA-guided endonuclease, the at least two guide RNAs excise a portion of the DNA fragment from the DMD gene, wherein the size of the excised portion of the exon is between 8 and 167 nucleotides.

13. The composition of any one of the preceding claims, wherein the guide RNA is an sgRNA.

14. The composition of any one of the preceding claims, wherein the guide RNA is modified.

15. The composition of any one of the preceding claims, wherein the one or more guide RNAs or nucleic acids are in a vector.

16. The composition of claim 15, wherein the vector is a viral vector.

17. The composition of claim 16, wherein the viral vector is an AAV vector.

18. The composition of claim 17, wherein the AAV vector is an AAV9 vector.

19. The composition of any one of the preceding claims, wherein the promoter for the one or more guide RNAs is hU6c.

20. The composition of any one of the preceding claims, wherein if the one or more guide RNAs is a guide RNA for SaCas9, the one or more guide RNAs comprise a scaffold comprising the sequence of SEQ ID NO: 504.

21. The composition of any one of the preceding claims, wherein if the one or more guide RNAs is a guide RNA for SluCas9, the one or more guide RNAs comprise a scaffold comprising the sequence of SEQ ID NO: 901.

22. The composition of any one of the preceding claims, wherein the one or more guide RNAs are in an AAV vector, wherein the vector comprises from 5′ to 3′ with respect to the plus strand: the reverse complement of a first guide RNA scaffold sequence; the reverse complement of a nucleic acid encoding a first sgRNA guide sequence; the reverse complement of a promoter for expression of the nucleic acid encoding the first sgRNA guide sequence; a promoter (e.g., CK8e) for expression of a nucleic acid encoding SaCas9, SluCas9, or a sRGN; a nucleic acid encoding a SaCas9, SluCas9 or a sRGN; a polyadenylation sequence; a promoter for expression of a second sgRNA guide sequence in the same direction as the promoter for SaCas9, SluCas9, or the sRGN; a second sgRNA guide sequence; and a second sgRNA scaffold sequence.

23. The composition of any one of the preceding claims, wherein the composition comprises a pair of guide RNAs, wherein the first and the second guide RNAs of the pair of guide RNAs target the same exon in the dystrophin gene.

24. The composition of claim 23, wherein the first guide RNA and the second guide RNA are not the same.

25. The composition of claim 23, wherein the first guide RNA targets a different site in the same exon targeted by the second guide RNA.

26. The composition of claim 23, wherein the exon is selected from the group consisting of exons: 1, 2, 3, 4, 5, 6, 7, 8, 9, 10, 11, 12, 13, 14, 15, 16, 17, 18, 19, 20, 21, 22, 23, 24, 25, 26, 27, 28, 29, 30, 31, 32, 33, 34, 35, 36, 37, 38, 39, 40, 41, 42, 43, 46, 47, 48, 49, 52, 54, 55, 56, 57, 58, 59, 60, 61, 62, 63, 64, 65, 66, 67, 68, 69, 70, 71, 72, 73, 74, 75, 76, 77, 78, or 79 of the dystrophin gene.

27. The composition of any one of claims 1-26, wherein the one or more guide RNA sequences, or the first and/or second guide RNA sequence of the pair of guide RNAs, is no more than 16, no more than 17, no more than 18, no more than 19, no more than 20, no more than 21, or no more than 22 nucleotides in length.

28. A method of treating Duchenne Muscular Dystrophy (DMD), the method comprising delivering to a cell a composition of any one of claims 1-27.

29. A method of excising a portion of the DMD gene, the method comprising delivering to a cell a composition of any one of claims 1-27, wherein the size of the excised portion is less than about 250 nucleotides.

The application's sequence listing, which the Patent Office published only in electronic form, follows.

SEQUENCE LISTING (9014 sequences)

SEQ ID NO: 1 - DNA, 3171 bp, synthetic construct
  misc_feature 1..3171: note = Synthetic
  source 1..3171: mol_type = other DNA
atgaatcagaaattcatcctgggactggacatcggcattacctctgtgggctacggcttgattgactacgagaccaagaacatcatcgacgccggcgttagactgtttcctgaggccaatgtggaaaacaacgagggcagacggtctaagcggggctctagacgactgaaaagaagaagaatccacagactggaaagagtgaagctgctgctgaccgagtacgacctgatcaataaggaacagatccctacaagcaacaacccctaccagattagagtgaagggcctgagcgagatcctgagcaaagacgagctggccatcgccctgctgcacctggccaagcggaggggcatccacaacgtggatgtggccgccgacaaggaggaaaccgccagcgactccctgagcaccaaagatcagatcaacaagaatgccaagttcctggagagcagatacgtgtgcgagctgcagaaggagagattggagaacgagggccacgtgcggggcgtggagaatagattcctgacaaaagatatcgtgcgggaagccaagaagatcatcgacacccagatgcagtactatcctgaaatcgacgaaaccttcaaggagaagtacatcagcctggtcgaaaccagacgcgagtatttcgagggccccggacagggctctcctttcggctggaacggcgatctgaagaagtggtacgagatgctgatgggacactgcacctacttccctcaagagctgagatctgtgaagtacgcctacagcgccgatctgttcaacgccctgaacgatctgaacaaccttatcatccagcgggacaattctgagaagctggaataccacgagaaatatcatatcatcgagaacgtctttaaacaaaagaaaaagcctaccctgaagcagatcgccaaggagatcggagtgaatcctgaggatatcaaaggctacagaatcacaaagtccggcacccctgagttcaccagctttaagctgttccacgacctgaagaaggtcgtgaaagaccacgccatcctcgatgacatcgatctgctgaaccagatcgctgagatcctgacaatctaccaggacaaagattctatcgtggctgaactgggacagctggaataccttatgagcgaggccgacaagcaaagcatctccgaactgaccggctacacgggcacccatagcctgagcctgaagtgtatgaacatgatcatcgatgagctgtggcactctagcatgaaccagatggaagttttcacctacctgaacatgcggcctaagaagtacgagctgaagggctaccagagaatccccaccgatatgatcgacgacgccatcctgagccccgtggtgaaaagaacattcatccagagcatcaacgtgatcaacaaggtgatcgagaagtacggcattccagaggacatcatcatcgagctggccagagaaaacaacagcgacgatagaaagaagtttatcaacaacctgcagaaaaaaaacgaggccacccggaagagaattaatgagatcatcggccagacaggcaaccagaacgccaaaaggatcgtggaaaaaatcagactgcacgaccagcaggagggcaagtgcctgtactctctggaaagcatccccctggaggacctgctgaacaatccaaatcactacgaggtggaccacatcatccctagaagcgtcagcttcgacaacagctaccacaacaaggtgctggtgaagcagagcgaaaacagtaagaaatccaacctgacaccttaccagtactttaacagcggcaagagcaagctgagctacaaccagttcaagcagcacatcctgaacctgtccaaatctcaggatagaatctccaagaaaaagaaggaatacctgctggaggagagagatatcaacaagttcgaagtccaaaaggagttcatcaacaggaacctggtggacacccggtacgccacaagagagctgacaaactacctgaaagcctacttcagcgctaacaacatgaacgtgaaggtgaaaaccatcaatggaagtttcacagactaccttcggaaggtgtggaagttcaagaaggaacggaatcacggctacaagcaccacgcagaggacgccctgattatagctaatgccgatttcctgttcaaagaaaacaagaagctgaaagccgtgaacagcgttctggaaaagcctgaaattgagaccaagcaactggatatacaggtggacagcgaggacaactactccgagatgttcatcatccctaaacaggtgcaggacatcaaagacttcagaaatttcaagtacagccacagagtggacaagaaacccaaccggcagctgatcaatgacaccctgtatagcacccgcaagaaggataacagcacctacatcgtccagaccatcaaggacatctacgctaaggacaacaccaccctgaaaaagcaatttgataagtcccccgaaaagtttctgatgtaccaacacgatcctagaaccttcgaaaagttggaggtgatcatgaagcaatatgccaacgagaagaacccactggccaagtaccatgaggagacaggagaatacctgaccaagtattctaagaagaataacggccccatcgtgaagtccctgaagtacattgggaacaaactcggaagccacctggacgtgacgcaccagttcaagagcagcaccaagaagctagtgaaactgagcatcaagaactacagattcgacgtgtacctgacagaaaagggctacaaatttgtgaccatcgcttacctgaatgtgttcaaaaaggacaattattactacatcccaaaggacaagtaccaggagcttaaagagaaaaaaaagatcaaggataccgaccagtttatcgctagcttctacaagaacgacctgattaagctgaacggcgacctgtacaagatcatcggcgtgaactctgacgaccggaacataatagagctggattattatgacatcaagtacaaggactactgcgagatcaacaacatcaagggcgagcctagaatcaaaaagaccatcgggaagaaaaccgagtctatcgaaaagtttacaacagacgtgctgggcaacctgtacctgcacagcacggaaaaggcccctcagctcatcttcaagagaggcctg

SEQ ID NO: 2 - DNA, 3168 bp, synthetic construct
  misc_feature 1..3168: note = Synthetic
  source 1..3168: mol_type = other DNA
aaccagaagtttatcctgggcctggatatcggcatcacatccgtgggctacggcctgattgattacgaaaccaagaacatcattgatgccggcgtccggcttttccctgaagctaacgtggaaaacaatgagggcagacggagcaagagaggcagcagacggctgaagcggagaagaatccatagactcgaacgggtgaagctgctgctgaccgagtacgacctgatcaacaaggagcagatccccaccagcaacaacccataccagatcagagtgaaaggcctttctgagattctgagcaaggatgagctggctatcgctctgctccacctggccaagagaaggggaatccacaacgttgacgtggccgccgataaggaagagaccgccagcgatagcctgagcaccaaggaccagatcaacaagaacgccaagttcctggaaagcagatacgtgtgcgagctgcaaaaagagagactggaaaatgagggccatgtgcggggcgttgagaacagattcctgaccaaagacatcgtcagagaggccaagaaaattattgacacccagatgcagtactatcctgagatagacgagacctttaaggaaaagtacatcagcctggtggaaacaagaagagaatacttcgaaggacctggccagggctcccctttcggctggaacggcgacctgaagaagtggtacgagatgctgatgggccactgcacctacttcccccaggagctgcggagcgtgaagtacgcttacagcgccgacctgttcaatgccctgaacgacctgaacaatcttatcatccaaagagataacagcgagaaattagaataccacgagaagtaccacatcatcgagaatgtgttcaagcaaaagaagaagcctaccctgaagcagatcgccaaagagatcggcgtgaaccctgaggacatcaagggctatcggatcaccaagtccggcacccctgaattcaccagcttcaagctgtttcacgacctcaaaaaggtcgtgaaggaccacgccatcctggacgacatcgatctgctgaatcagatcgccgagatcctgaccatctaccaggacaaggactctatcgtggccgagcttggacagctggagtacctgatgagcgaggctgacaagcagagcatcagcgagctgaccggctacaccggaacccacagcctgtccctgaagtgcatgaacatgatcatcgacgagctgtggcactctagcatgaaccagatggaagtgttcacctacctgaacatgagacctaagaagtacgaactgaagggttaccagagaatcccaaccgacatgatcgacgacgccatcctgagccccgtggtgaagcggacctttatccagagcatcaatgtgatcaacaaggtgatcgagaaatacggcatccccgaggacatcatcatcgaactggccagagagaataactctgatgaccggaagaagttcatcaacaacctgcagaagaagaacgaagccaccagaaagcgcatcaacgagatcatcggccaaacagggaatcagaacgccaagaggatcgtggaaaagattcggctgcacgaccagcaggagggaaaatgcctgtacagcctggaaagcatccccctggaagatctactgaacaaccccaaccactacgaggtggatcacatcatccctagaagcgtgtcctttgacaacagttaccacaacaaggtgctggtgaagcaatccgagaactcgaagaagagcaacctgacaccttaccagtactttaacagcggcaagtccaagctgtcttataaccagttcaagcagcacatcctcaacctgtcaaagtctcaggacagaatctctaagaagaagaaggagtatctgctggaagagcgggacatcaacaagttcgaggtgcagaaagagttcattaacagaaacctggtcgacacccggtacgccacacgcgaactgacaagctacctgaaggcctacttctccgccaacaatatggacgtgaaggtcaagaccatcaatggcagcttcacaaatcacctgagaaaggtctggcggttcgacaagtacagaaaccacggctacaagcaccacgccgaggatgctctgattatcgccaacgccgacttcctgttcaaggaaaacaaaaaactgcagaacaccaacaagatcctggaaaaacctacaatcgagaacaacacaaagaaagtgacagtggaaaaagaggaagattacaacaacgtgtttgagacacctaagctggttgaggatatcaagcagtaccgggactataagtttagccacagagtggacaagaaacctaacaggcagctgatcaacgacactctgtacagcacaagaatgaaagatgagcacgattacatcgtgcagaccattaccgacatctacggcaaggacaacaccaatctgaagaagcagttcaacaaaaatcccgagaagttcctgatgtaccaaaatgaccctaagacattcgagaagctgagcatcatcatgaaacagtactctgatgagaagaacccactggccaagtactacgaggaaacaggcgaatacctgaccaagtactctaagaagaacaacggccctatcgtgaagaagatcaaactgctgggcaacaaagtgggaaatcatctggatgtgaccaataaatacgagaactctacaaagaaactggtgaagctgagcattaagaactacagattcgacgtctacctgacagaaaagggatacaagttcgtgaccatcgcctacctgaacgtgttcaagaaagacaactactactacatcccaaaagacaagtaccaagagttaaaagagaagaagaagataaaggataccgaccagtttatcgcttctttctacaagaacgacctgatcaagctgaacggtgatctgtacaaaatcatcggagtgaatagcgatgacagaaatatcatcgaactggattactatgacatcaagtacaaagattattgtgaaatcaacaacatcaagggagagcccagaattaagaaaaccatcggcaagaaaacagagagcatcgagaaattcaccacagatgtgctgggcaacctgtacctgcacagcacagagaaagcccctcagctcatcttcaagagaggcctg

SEQ ID NO: 3 - DNA, 3162 bp, synthetic construct
  misc_feature 1..3162: note = Synthetic
  source 1..3162: mol_type = other DNA
atgaatcaaaagtttatcctgggtctggacatcggcatcacatctgtgggctacggccttatcgattacgagaccaagaatatcattgatgctggcgtacggctgttccctgaggctaacgtggaaaacaacgagggtagacggagcaagagaggcagcagacggctgaaacggcgtagaatccaccggctggagagagtgaagaagttgctggaagattacaacttgctggatcaatcccagatcccccagagcactaatccttatgctatccgggtgaagggcctgtctgaagccctgagcaaagacgagctggtgattgccctgctgcacatcgcgaagagaagaggcatccacaatatcaatgtgtcctctgaggatgaggatgccagcaacgagctgagcactaaggaacagatcaatcggaacaacaagctgctgaaggacaagtacgtgtgtgaagtgcagctgcagagactgaaggaaggccagataagaggcgaaaagaacagattcaagacaacagacatcctgaaagaaatcgaccagctgctgaaggtccagaaggactaccacaacctcgacatcgatttcattaaccagtacaaggaaatcgtggaaaccaggagagagtacttcgagggccctggcaagggctccccatacggctgggagggcgaccccaaggcctggtacgaaaccctgatgggccactgcacctacttccccgacgaactgagaagcgtcaagtacgcctacagcgccgatctgttcaacgccctgaacgacctgaacaacctggtgatccagcgggacggcctgagcaaactggagtaccatgaaaagtatcatatcatcgagaacgtgttcaagcagaagaaaaaacctaccctgaagcagatcgccaacgagatcaacgtgaaccctgaggacattaaaggctacagaatcaccaaaagcggcaagccagagttcaccagcttcaagctgtttcacgacctgaagaaggtcgtgaaagaccacgccatcctggacgacatcgatctgcttaaccagatcgctgaaatcctcacaatctaccaggacaaggactctatcgtggccgagctgggacagctggaatacctgatgagcgaggccgataagcagagcatcagcgagctgaccggctacaccggaacccacagcctgagcctgaagtgtatgaacatgatcatcgacgagctgtggcacagctctatgaaccagatggaagtattcacctacctgaacatgagacctaagaagtacgaactgaagggctatcagagaatccctacagacatgatcgacgatgccatcctgtctcctgtggtgaagagaaccttcatccagtctatcaacgtgatcaacaaggtgatcgaaaagtacggaatccctgaagatatcatcatcgaactggccagagagaacaactccgacgacagaaagaaattcatcaacaacctgcagaagaagaatgaggccacacggaagcggattaatgagatcatcggccaaaccggcaaccagaacgccaaaagaatcgtggaaaagatccggctgcacgatcagcaggagggcaaatgcctgtacagcctggagagcatccccctggaggacctgctcaacaaccccaaccactacgaggtggatcacatcatcccaagatctgttagcttcgacaacagctaccacaacaaggtgctggtgaagcaaagcgaaaactctaagaaatctaacctgacaccttaccagtactttaacagcggcaagtccaagctgtcttataaccagtttaagcagcacatcctgaacctgagcaagtcccaggatagaatcagcaaaaaaaagaaggaatacctgctggaggaacgcgacatcaataaatttgaggtgcaaaaggagttcatcaaccggaacctggtggacacccggtacgccaccagagaactgaccaactacctgaaagcctacttcagcgccaacaacatgaacgtgaaggtgaaaaccatcaacggaagcttcaccgactacctgcggaaggtgtggaagttcaagaaagagcggaatcacggctataagcaccacgctgaggacgctctgatcatcgccaatgccgatttcctgttcaaggaaaacaagaagttaaaggccgtgaactctgtcctggagaagcccgagatcgagacaaagcagctggacatccaagtggactcagaggacaattactctgagatgttcatcatccccaagcaggtgcaggacatcaaggattttagaaatttcaagtacagccatagagtggacaagaagcccaatagacagctgatcaacgatacactgtacagcaccagaaagaaggacaacagcacatatatcgtccagaccatcaaggacatttacgcaaaggataacaccacactgaagaagcagttcgacaaaagccctgagaagttcctgatgtaccaacacgaccctcggaccttcgagaagttagaggttatcatgaaacagtacgccaacgagaaaaaccctctggccaagtaccacgaggaaaccggagaatacctgacaaaatatagcaagaagaacaacggccccatcgtgaaaagcctgaagtacatcggcaacaagctgggcagccacctggacgtgacccaccagttcaagagcagcaccaagaagctggtcaagctgagcatcaagccttataggttcgacgtgtacctgacagataagggatacaagttcatcaccatcagctacctggatgttctgaaaaaggacaattactactacatccctgagcagaagtacgacaaactcaagctgggcaaggccatcgataagaatgccaagttcatcgcatctttttacaagaacgacctgatcaaactggacggcgagatctacaagatcataggagtgaacagcgacaccaggaatatgatcgagctcgatctgcctgacatcagatacaaggaatactgcgagctgaacaacatcaagggagagcctagaatcaagaaaaccatcggcaagaaggtgaacagcatcgagaaacttacaacagatgtgctcggcaacgtgttcaccaacacccagtacaccaagccacagctgctgtttaagcgggggaac

SEQ ID NO: 4-5 - skipped (2 entries)

SEQ ID NO: 6 - DNA, 144 bp, synthetic construct
  misc_feature 1..144: note = Synthetic
  source 1..144: mol_type = other DNA
cggccactccctctctgcgcgctcgctcgctcactgaggccgggcgaccaaaggtcgcccgacgcccgggctttgcccgggcggcctcagtgagcgagcgagcgcgcagagagggagtggccaactccatcactaggggttcct

SEQ ID NO: 7 - DNA, 138 bp, synthetic construct
  misc_feature 1..138: note = Synthetic
  source 1..138: mol_type = other DNA
aggaacccctagtgatggagttggccactccctctctgcgcgctcgctcgctcactgaggccgggcgaccaaaggtcgcccgacgcccgggctttgcccgggcggcctcagtgagcgagcgagcgcgcagagagggaa

SEQ ID NO: 8 - protein, 1368 aa, synthetic construct [sequence omitted]

SEQ ID NO: 9-499 - skipped (491 entries)

SEQ ID NO: 500 - DNA, 86 bp, synthetic construct
  misc_feature 1..86: note = Synthetic
  source 1..86: mol_type = other DNA
gtttaagtactctgtgctggaaacagcacagaatctacttaaacaaggcaaaatgccgtgtttatctcgtcaacttgttggcgaga

SEQ ID NO: 501 - DNA, 77 bp, synthetic construct
  misc_feature 1..77: note = Synthetic
  source 1..77: mol_type = other DNA
gttttagtactctggaaacagaatctactaaaacaaggcaaaatgccgtgtttatctcgtcaacttgttggcgagat

SEQ ID NO: 502 - DNA, 87 bp, synthetic construct
  misc_feature 1..87: note = Synthetic
  source 1..87: mol_type = other DNA
gtttaagtactctgtgctggaaacagcacagaatctacttaaacaaggcaaaatgccgtgtttatctcgtcaacttgttggcgagat

SEQ ID NO: 503 - DNA, 77 bp, synthetic construct
  misc_feature 1..77: note = Synthetic
  source 1..77: mol_type = other DNA
gtttaagtactctggaaacagaatctacttaaacaaggcaaaatgccgtgtttatctcgtcaacttgttggcgagat

SEQ ID NO: 504 - DNA, 77 bp, synthetic construct
  misc_feature 1..77: note = Synthetic
  source 1..77: mol_type = other DNA
gtttcagtactctggaaacagaatctactgaaacaaggcaaaatgccgtgtttatctcgtcaacttgttggcgagat

SEQ ID NO: 505-549 - skipped (45 entries)

SEQ ID NO: 550 - protein, 4 aa, synthetic construct
  REGION 1..4: note = Synthetic
GSVD

SEQ ID NO: 551 - protein, 4 aa, synthetic construct
  REGION 1..4: note = Synthetic
GSGS

SEQ ID NO: 552-599 - skipped (48 entries)

SEQ ID NO: 600 - DNA, 76 bp, synthetic construct
  source 1..76: mol_type = other DNA
gttttagtactctggaaacagaatctactgaaacaagacaatatgtcgtgtttatcccatcaatttattggtggga

SEQ ID NO: 601 - DNA, 86 bp, synthetic construct
  misc_feature 1..86: note = Synthetic
  source 1..86: mol_type = other DNA
gtttaagtactctgtgctggaaacagcacagaatctactgaaacaagacaatatgtcgtgtttatcccatcaatttattggtggga

SEQ ID NO: 602-699 - skipped (98 entries)

SEQ ID NO: 700 - DNA, 450 bp, synthetic construct
  misc_feature 1..450: note = Synthetic
  source 1..450: mol_type = other DNA
ctagactagcatgctgcccatgtaaggaggcaaggcctggggacacccgagatgcctggttataattaacccagacatgtggctgcccccccccccccaacacctgctgcctctaaaaataaccctgcatgccatgttcccggcgaagggccagctgtcccccgccagctagactcagcacttagtttaggaaccagtgagcaagtcagcccttggggcagcccatacaaggccatggggctgggcaagctgcacgcctgggtccggggtgggcacggtgcccgggcaacgagctgaaagctcatctgctctcaggggcccctccctggggacagcccctcctggctagtcacaccctgtaggctcctctatataacccaggggcacaggggctgccctcattctaccaccacctccacagcacagacagacactcaggagccagccagc

SEQ ID NO: 701 - DNA, 436 bp, synthetic construct
  misc_feature 1..436: note = Synthetic
  source 1..436: mol_type = other DNA
tgcccatgtaaggaggcaaggcctggggacacccgagatgcctggttataattaacccagacatgtggctgcccccccccccccaacacctgctgcctctaaaaataaccctgcatgccatgttcccggcgaagggccagctgtcccccgccagctagactcagcacttagtttaggaaccagtgagcaagtcagcccttggggcagcccatacaaggccatggggctgggcaagctgcacgcctgggtccggggtgggcacggtgcccgggcaacgagctgaaagctcatctgctctcaggggcccctccctggggacagcccctcctggctagtcacaccctgtaggctcctctatataacccaggggcacaggggctgccctcattctaccaccacctccacagcacagacagacactcaggagccagccagc

SEQ ID NO: 702 - DNA, 472 bp, synthetic construct
  misc_feature 1..472: note = Synthetic
  source 1..472: mol_type = other DNA
cgagtccaacacccgtgggaatcccatgggcaccatggcccctcgctccaaaaatgctttcgcgtcgcgcagacactgctcggtagtttcggggatcagcgtttgagtaagagcccgcgtctgaaccctccgcgccgccccggccccagtggaaagacgcgcaggcaaaacgcaccacgtgacggagcgtgaccgcgcgccgagcgcgcgccaaggtcgggcaggaagagggcctatttcccatgattccttcatatttgcatatacgatacaaggctgttagagagataattagaattaatttgactgtaaacacaaagatattagtacaaaatacgtgacgtagaaagtaataatttcttgggtagtttgcagttttaaaattatgttttaaaatggactatcatatgcttaccgtaacttgaaagtatttcgatttcttggctttatatatcttgtggaaaggacgaaa

SEQ ID NO: 703 - DNA, 108 bp, synthetic construct
  misc_feature 1..108: note = Synthetic
  source 1..108: mol_type = other DNA
gctcggcgcgcccatatttgcatgtcgctatgtgttctgggaaatcaccataaacgtgaaatgtctttggatttgggaatcttataagttctgtatgagaccacggta

SEQ ID NO: 704 - DNA, 251 bp, synthetic construct
  misc_feature 1..251: note = Synthetic
  source 1..251: mol_type = other DNA
tgacggcgcgccctgcagtatttagcatgccccacccatctgcaaggcattctggatagtgtcaaaacagccggaaatcaagtccgtttatctcaaactttagcattttgggaataaatgatatttgctatgctggttaaattagattttagttaaatttcctgctgaagctctagtacgataagtaacttgacctaagtgtaaagttgagatttccttcaggtttatatagcttgtgcgccgcctgggta

SEQ ID NO: 705 - DNA, 249 bp, synthetic construct
  misc_feature 1..249: note = Synthetic
  source 1..249: mol_type = other DNA
gagggcctatttcccatgattccttcatatttgcatatacgatacaaggctgttagagagataattggaattaatttgactgtaaacacaaagatattagtacaaaatacgtgacgtagaaagtaataatttcttgggtagtttgcagttttaaaattatgttttaaaatggactatcatatgcttaccgtaacttgaaagtatttcgatttcttggctttatatatcttgtggaaaggacgaaacacc

SEQ ID NO: 706 - DNA, 243 bp, synthetic construct
  misc_feature 1..243: note = Synthetic
  source 1..243: mol_type = other DNA
ctgcagtatttagcatgccccacccatctgcaaggcattctggatagtgtcaaaacagccggaaatcaagtccgtttatctcaaactttagcattttgggaataaatgatatttgctatgctggttaaattagattttagttaaatttcctgctgaagctctagtacgataagcaacttgacctaagtgtaaagttgagacttccttcaggtttatatagcttgtgcgccgcttgggtacctc

SEQ ID NO: 707 - DNA, 100 bp, synthetic construct
  misc_feature 1..100: note = Synthetic
  source 1..100: mol_type = other DNA
aatatttgcatgtcgctatgtgttctgggaaatcaccataaacgtgaaatgtctttggatttgggaatcttataagttctgtatgagaccactctttccc

SEQ ID NO: 708 - DNA, 100 bp, synthetic construct
  misc_feature 1..100: note = Synthetic
  source 1..100: mol_type = other DNA
atatttagcatgtcgctatgtgttctgggaaacttgacctaagtgtaaagttgagatttccttcaggtttatatagttctgtatgagaccactctttccc

SEQ ID NO: 709 - DNA, 143 bp, synthetic construct
  misc_feature 1..143: note = Synthetic
  source 1..143: mol_type = other DNA
ggccactccctctctgcgcgctcgctcgctcactgaggccgggcgaccaaaggtcgcccgacgcccgggctttgcccgggcggcctcagtgagcgagcgagcgcgcagagagggagtggccaactccatcactaggggttcct

SEQ ID NO: 710 - DNA, 137 bp, synthetic construct
  misc_feature 1..137: note = Synthetic
  source 1..137: mol_type = other DNA
aggaacccctagtgatggagttggccactccctctctgcgcgctcgctcgctcactgaggccgggcgaccaaaggtcgcccgacgcccgggctttgcccgggcggcctcagtgagcgagcgagcgcgcagagaggga

SEQ ID NO: 711 - protein, 1052 aa, Staphylococcus aureus
  REGION 1..1052: note = misc_feature - Staphylococcus aureus Cas9
KRNYILGLDIGITSVGYGIIDYETRDVIDAGVRLFKEANVENNEGRRSKRGARRLKRRRRHRIQRVKKLLFDYNLLTDHSELSGINPYEARVKGLSQKLSEEEFSAALLHLAKRRGVHNVNEVEEDTGNELSTKEQISRNSKALEEKYVAELQLERLKKDGEVRGSINRFKTSDYVKEAKQLLKVQKAYHQLDQSFIDTYIDLLETRRTYYEGPGEGSPFGWKDIKEWYEMLMGHCTYFPEELRSVKYAYNADLYNALNDLNNLVITRDENEKLEYYEKFQIIENVFKQKKKPTLKQIAKEILVNEEDIKGYRVTSTGKPEFTNLKVYHDIKDITARKEIIENAELLDQIAKILTIYQSSEDIQEELTNLNSELTQEEIEQISNLKGYTGTHNLSLKAINLILDELWHTNDNQIAIFNRLKLVPKKVDLSQQKEIPTTLVDDFILSPVVKRSFIQSIKVINAIIKKYGLPNDIIIELAREKNSKDAQKMINEMQKRNRQTNERIEEIIRTTGKENAKYLIEKIKLHDMQEGKCLYSLEAIPLEDLLNNPFNYEVDHIIPRSVSFDNSFNNKVLVKQEENSKKGNRTPFQYLSSSDSKISYETFKKHILNLAKGKGRISKTKKEYLLEERDINRFSVQKDFINRNLVDTRYATRGLMNLLRSYFRVNNLDVKVKSINGGFTSFLRRKWKFKKERNKGYKHHAEDALIIANADFIFKEWKKLDKAKKVMENQMFEEKQAESMPEIETEQEYKEIFITPHQIKHIKDFKDYKYSHRVDKKPNRELINDTLYSTRKDDKGNTLIVNNLNGLYDKDNDKLKKLINKSPEKLLMYHHDPQTYQKLKLIMEQYGDEKNPLYKYYEETGNYLTKYSKKDNGPVIKKIKYYGNKLNAHLDITDDYPNSRNKVVKLSLKPYRFDVYLDNGVYKFVTVKNLDVIKKENYYEVNSKCYEEAKKLKKISNQAEFIASFYNNDLIKINGELYRVIGVNNDLLNRIEVNMIDITYREYLENMNDKRPPRIIKTIASKTQSIKKYSTDILGNLYEVKSKKHPQIIKKG

SEQ ID NO: 712 - protein, 1053 aa, Staphylococcus lugdunensis
  REGION 1..1053: note = misc_feature - Staphylococcus lugdunensis Cas9
NQKFILGLDIGITSVGYGLIDYETKNIIDAGVRLFPEANVENNEGRRSKRGSRRLKRRRIHRLERVKKLLEDYNLLDQSQIPQSTNPYAIRVKGLSEALSKDELVIALLHIAKRRGIHKIDVIDSNDDVGNELSTKEQLNKNSKLLKDKFVCQIQLERMNEGQVRGEKNRFKTADIIKEIIQLLNVQKNFHQLDENFINKYIELVEMRREYFEGPGKGSPYGWEGDPKAWYETLMGHCTYFPDELRSVKYAYSADLFNALNDLNNLVIQRDGLSKLEYHEKYHIIENVFKQKKKPTLKQIANEINVNPEDIKGYRITKSGKPQFTEFKLYHDLKSVLFDQSILENEDVLDQIAEILTIYQDKDSIKSKLTELDILLNEEDKENIAQLTGYTGTHRLSLKCIRLVLEEQWYSSRNQMEIFTHLNIKPKKINLTAANKIPKAMIDEFILSPVVKRTFGQAINLINKIIEKYGVPEDIIIELARENNSKDKQKFINEMQKKNENTRKRINEIIGKYGNQNAKRLVEKIRLHDEQEGKCLYSLESIPLEDLLNNPNHYEVDHIIPRSVSFDNSYHNKVLVKQSENSKKSNLTPYQYFNSGKSKLSYNQFKQHILNLSKSQDRISKKKKEYLLEERDINKFEVQKEFINRNLVDTRYATRELTNYLKAYFSANNMNVKVKTINGSFTDYLRKVWKFKKERNHGYKHHAEDALIIANADFLFKENKKLKAVNSVLEKPEIETKQLDIQVDSEDNYSEMFIIPKQVQDIKDFRNFKYSHRVDKKPNRQLINDTLYSTRKKDNSTYIVQTIKDIYAKDNTTLKKQFDKSPEKFLMYQHDPRTFEKLEVIMKQYANEKNPLAKYHEETGEYLTKYSKKNNGPIVKSLKYIGNKLGSHLDVTHQFKSSTKKLVKLSIKPYRFDVYLTDKGYKFITISYLDVLKKDNYYYIPEQKYDKLKLGKAIDKNAKFIASFYKNDLIKLDGEIYKIIGVNSDTRNMIELDLPDIRYKEYCELNNIKGEPRIKKTIGKKVNSIEKLTTDVLGNVFTNTQYTKPQLLFKRGN

SEQ ID NO: 713 - protein, 7 aa, unidentified
  REGION 1..7: note = SV40 NLS
PKKKRKV

SEQ ID NO: 714 - protein, 16 aa, synthetic construct
  REGION 1..16: note = Synthetic
KRPAATKKAGQAKKKK

SEQ ID NO: 715 - protein, 1052 aa, synthetic construct
  REGION 1..1052: note = Synthetic
KRNYILGLDIGITSVGYGIIDYETRDVIDAGVRLFKEANVENNEGRRSKRGARRLKRRRRHRIQRVKKLLFDYNLLTDHSELSGINPYEARVKGLSQKLSEEEFSAALLHLAKRRGVHNVNEVEEDTGNELSTKEQISRNSKALEEKYVAELQLERLKKDGEVRGSINRFKTSDYVKEAKQLLKVQKAYHQLDQSFIDTYIDLLETRRTYYEGPGEGSPFGWKDIKEWYEMLMGHCTYFPEELRSVKYAYNADLYNALNDLNNLVITRDENEKLEYYEKFQIIENVFKQKKKPTLKQIAKEILVNEEDIKGYRVTSTGKPEFTNLKVYHDIKDITARKEIIENAELLDQIAKILTIYQSSEDIQEELTNLNSELTQEEIEQISNLKGYTGTHNLSLKAINLILDELWHTNDNQIAIFNRLKLVPKKVDLSQQKEIPTTLVDDFILSPVVKRSFIQSIKVINAIIKKYGLPNDIIIELAREKNSKDAQKMINEMQKRNRQTNERIEEIIRTTGKENAKYLIEKIKLHDMQEGKCLYSLEAIPLEDLLNNPFNYEVDHIIPRSVSFDNSFNNKVLVKQEENSKKGNRTPFQYLSSSDSKISYETFKKHILNLAKGKGRISKTKKEYLLEERDINRFSVQKDFINRNLVDTRYATRGLMNLLRSYFRVNNLDVKVKSINGGFTSFLRRKWKFKKERNKGYKHHAEDALIIANADFIFKEWKKLDKAKKVMENQMFEEKQAESMPEIETEQEYKEIFITPHQIKHIKDFKDYKYSHRVDKKPNRKLINDTLYSTRKDDKGNTLIVNNLNGLYDKDNDKLKKLINKSPEKLLMYHHDPQTYQKLKLIMEQYGDEKNPLYKYYEETGNYLTKYSKKDNGPVIKKIKYYGNKLNAHLDITDDYPNSRNKVVKLSLKPYRFDVYLDNGVYKFVTVKNLDVIKKENYYEVNSKCYEEAKKLKKISNQAEFIASFYKNDLIKINGELYRVIGVNNDLLNRIEVNMIDITYREYLENMNDKRPPHIIKTIASKTQSIKKYSTDILGNLYEVKSKKHPQIIKKG

SEQ ID NO: 716 - protein, 1052 aa, synthetic construct
  REGION 1..1052: note = Synthetic
KRNYILGLDIGITSVGYGIIDYETRDVIDAGVRLFKEANVENNEGRRSKRGARRLKRRRRHRIQRVKKLLFDYNLLTDHSELSGINPYEARVKGLSQKLSEEEFSAALLHLAKRRGVHNVNEVEEDTGNELSTKEQISRNSKALEEKYVAELQLERLKKDGEVRGSINRFKTSDYVKEAKQLLKVQKAYHQLDQSFIDTYIDLLETRRTYYEGPGEGSPFGWKDIKEWYEMLMGHCTYFPEELASVKYAYNADLYNALNDLNNLVITRDENEKLEYYEKFQIIENVFKQKKKPTLKQIAKEILVNEEDIKGYRVTSTGKPEFTNLKVYHDIKDITARKEIIENAELLDQIAKILTIYQSSEDIQEELTNLNSELTQEEIEQISNLKGYTGTHNLSLKAINLILDELWHTNDAQIAIFARLKLVPKKVDLSQQKEIPTTLVDDFILSPVVKRSFIQSIKVINAIIKKYGLPNDIIIELAREKNSKDAQKMINEMQKRNRQTNERIEEIIRTTGKENAKYLIEKIKLHDMQEGKCLYSLEAIPLEDLLNNPFNYEVDHIIPRSVSFDNSFNNKVLVKQEENSKKGNRTPFQYLSSSDSKISYETFKKHILNLAKGKGRISKTKKEYLLEERDINRFSVQKDFINRNLVDTRYATAGLMNLLRSYFRVNNLDVKVKSINGGFTSFLRRKWKFKKERNKGYKHHAEDALIIANADFIFKEWKKLDKAKKVMENQMFEEKQAESMPEIETEQEYKEIFITPHQIKHIKDFKDYKYSHRVDKKPNRELINDTLYSTRKDDKGNTLIVNNLNGLYDKDNDKLKKLINKSPEKLLMYHHDPQTYQKLKLIMEQYGDEKNPLYKYYEETGNYLTKYSKKDNGPVIKKIKYYGNKLNAHLDITDDYPNSRNKVVKLSLKPYRFDVYLDNGVYKFVTVKNLDVIKKENYYEVNSKCYEEAKKLKKISNQAEFIASFYNNDLIKINGELYRVIGVNNDLLNRIEVNMIDITYREYLENMNDKRPPRIIKTIASKTQSIKKYSTDILGNLYEVKSKKHPQIIKKG

SEQ ID NO: 717 - protein, 1052 aa, synthetic construct
  REGION 1..1052: note = Synthetic
KRNYILGLDIGITSVGYGIIDYETRDVIDAGVRLFKEANVENNEGRRSKRGARRLKRRRRHRIQRVKKLLFDYNLLTDHSELSGINPYEARVKGLSQKLSEEEFSAALLHLAKRRGVHNVNEVEEDTGNELSTKEQISRNSKALEEKYVAELQLERLKKDGEVRGSINRFKTSDYVKEAKQLLKVQKAYHQLDQSFIDTYIDLLETRRTYYEGPGEGSPFGWKDIKEWYEMLMGHCTYFPEELASVKYAYNADLYNALNDLNNLVITRDENEKLEYYEKFQIIENVFKQKKKPTLKQIAKEILVNEEDIKGYRVTSTGKPEFTNLKVYHDIKDITARKEIIENAELLDQIAKILTIYQSSEDIQEELTNLNSELTQEEIEQISNLKGYTGTHNLSLKAINLILDELWHTNDAQIAIFARLKLVPKKVDLSQQKEIPTTLVDDFILSPVVKRSFIQSIKVINAIIKKYGLPNDIIIELAREKNSKDAQKMINEMQKRNRQTNERIEEIIRTTGKENAKYLIEKIKLHDMQEGKCLYSLEAIPLEDLLNNPFNYEVDHIIPRSVSFDNSFNNKVLVKQEENSKKGNRTPFQYLSSSDSKISYETFKKHILNLAKGKGRISKTKKEYLLEERDINRFSVQKDFINRNLVDTRYATAGLMNLLRSYFRVNNLDVKVKSINGGFTSFLRRKWKFKKERNKGYKHHAEDALIIANADFIFKEWKKLDKAKKVMENQMFEEKQAESMPEIETEQEYKEIFITPHQIKHIKDFKDYKYSHRVDKKPNRKLINDTLYSTRKDDKGNTLIVNNLNGLYDKDNDKLKKLINKSPEKLLMYHHDPQTYQKLKLIMEQYGDEKNPLYKYYEETGNYLTKYSKKDNGPVIKKIKYYGNKLNAHLDITDDYPNSRNKVVKLSLKPYRFDVYLDNGVYKFVTVKNLDVIKKENYYEVNSKCYEEAKKLKKISNQAEFIASFYKNDLIKINGELYRVIGVNNDLLNRIEVNMIDITYREYLENMNDKRPPHIIKTIASKTQSIKKYSTDILGNLYEVKSKKHPQIIKKG

SEQ ID NO: 718 - protein, 1053 aa, synthetic construct
  REGION 1..1053: note = Synthetic
NQKFILGLDIGITSVGYGLIDYETKNIIDAGVRLFPEANVENNEGRRSKRGSRRLKRRRIHRLERVKKLLEDYNLLDQSQIPQSTNPYAIRVKGLSEALSKDELVIALLHIAKRRGIHKIDVIDSNDDVGNELSTKEQLNKNSKLLKDKFVCQIQLERMNEGQVRGEKNRFKTADIIKEIIQLLNVQKNFHQLDENFINKYIELVEMRREYFEGPGKGSPYGWEGDPKAWYETLMGHCTYFPDELRSVKYAYSADLFNALNDLNNLVIQRDGLSKLEYHEKYHIIENVFKQKKKPTLKQIANEINVNPEDIKGYRITKSGKPQFTEFKLYHDLKSVLFDQSILENEDVLDQIAEILTIYQDKDSIKSKLTELDILLNEEDKENIAQLTGYTGTHRLSLKCIRLVLEEQWYSSRNQMEIFTHLNIKPKKINLTAANKIPKAMIDEFILSPVVKRTFGQAINLINKIIEKYGVPEDIIIELARENNSKDKQKFINEMQKKNENTRKRINEIIGKYGNQNAKRLVEKIRLHDEQEGKCLYSLESIPLEDLLNNPNHYEVDHIIPRSVSFDNSYHNKVLVKQSENSKKSNLTPYQYFNSGKSKLSYNQFKQHILNLSKSQDRISKKKKEYLLEERDINKFEVQKEFINRNLVDTRYATRELTNYLKAYFSANNMNVKVKTINGSFTDYLRKVWKFKKERNHGYKHHAEDALIIANADFLFKENKKLKAVNSVLEKPEIETKQLDIQVDSEDNYSEMFIIPKQVQDIKDFRNFKYSHRVDKKPNRKLINDTLYSTRKKDNSTYIVQTIKDIYAKDNTTLKKQFDKSPEKFLMYQHDPRTFEKLEVIMKQYANEKNPLAKYHEETGEYLTKYSKKNNGPIVKSLKYIGNKLGSHLDVTHQFKSSTKKLVKLSIKPYRFDVYLTDKGYKFITISYLDVLKKDNYYYIPEQKYDKLKLGKAIDKNAKFIASFYKNDLIKLDGEIYKIIGVNSDTRNMIELDLPDIRYKEYCELNNIKGEPHIKKTIGKKVNSIEKLTTDVLGNVFTNTQYTKPQLLFKRGN

SEQ ID NO: 719 - protein, 1053 aa, synthetic construct
  REGION 1..1053: note = Synthetic
NQKFILGLDIGITSVGYGLIDYETKNIIDAGVRLFPEANVENNEGRRSKRGSRRLKRRRIHRLERVKKLLEDYNLLDQSQIPQSTNPYAIRVKGLSEALSKDELVIALLHIAKRRGIHKIDVIDSNDDVGNELSTKEQLNKNSKLLKDKFVCQIQLERMNEGQVRGEKNRFKTADIIKEIIQLLNVQKNFHQLDENFINKYIELVEMRREYFEGPGKGSPYGWEGDPKAWYETLMGHCTYFPDELASVKYAYSADLFNALNDLNNLVIQRDGLSKLEYHEKYHIIENVFKQKKKPTLKQIANEINVNPEDIKGYRITKSGKPQFTEFKLYHDLKSVLFDQSILENEDVLDQIAEILTIYQDKDSIKSKLTELDILLNEEDKENIAQLTGYTGTHRLSLKCIRLVLEEQWYSSRAQMEIFAHLNIKPKKINLTAANKIPKAMIDEFILSPVVKRTFGQAINLINKIIEKYGVPEDIIIELARENNSKDKQKFINEMQKKNENTRKRINEIIGKYGNQNAKRLVEKIRLHDEQEGKCLYSLESIPLEDLLNNPNHYEVDHIIPRSVSFDNSYHNKVLVKQSENSKKSNLTPYQYFNSGKSKLSYNQFKQHILNLSKSQDRISKKKKEYLLEERDINKFEVQKEFINRNLVDTRYATAELTNYLKAYFSANNMNVKVKTINGSFTDYLRKVWKFKKERNHGYKHHAEDALIIANADFLFKENKKLKAVNSVLEKPEIETKQLDIQVDSEDNYSEMFIIPKQVQDIKDFRNFKYSHRVDKKPNRQLINDTLYSTRKKDNSTYIVQTIKDIYAKDNTTLKKQFDKSPEKFLMYQHDPRTFEKLEVIMKQYANEKNPLAKYHEETGEYLTKYSKKNNGPIVKSLKYIGNKLGSHLDVTHQFKSSTKKLVKLSIKPYRFDVYLTDKGYKFITISYLDVLKKDNYYYIPEQKYDKLKLGKAIDKNAKFIASFYKNDLIKLDGEIYKIIGVNSDTRNMIELDLPDIRYKEYCELNNIKGEPRIKKTIGKKVNSIEKLTTDVLGNVFTNTQYTKPQLLFKRGN

SEQ ID NO: 720 - protein, 1053 aa, synthetic construct
  REGION 1..1053: note = Synthetic
NQKFILGLDIGITSVGYGLIDYETKNIIDAGVRLFPEANVENNEGRRSKRGSRRLKRRRIHRLERVKKLLEDYNLLDQSQIPQSTNPYAIRVKGLSEALSKDELVIALLHIAKRRGIHKIDVIDSNDDVGNELSTKEQLNKNSKLLKDKFVCQIQLERMNEGQVRGEKNRFKTADIIKEIIQLLNVQKNFHQLDENFINKYIELVEMRREYFEGPGKGSPYGWEGDPKAWYETLMGHCTYFPDELASVKYAYSADLFNALNDLNNLVIQRDGLSKLEYHEKYHIIENVFKQKKKPTLKQIANEINVNPEDIKGYRITKSGKPQFTEFKLYHDLKSVLFDQSILENEDVLDQIAEILTIYQDKDSIKSKLTELDILLNEEDKENIAQLTGYTGTHRLSLKCIRLVLEEQWYSSRAQMEIFAHLNIKPKKINLTAANKIPKAMIDEFILSPVVKRTFGQAINLINKIIEKYGVPEDIIIELARENNSKDKQKFINEMQKKNENTRKRINEIIGKYGNQNAKRLVEKIRLHDEQEGKCLYSLESIPLEDLLNNPNHYEVDHIIPRSVSFDNSYHNKVLVKQSENSKKSNLTPYQYFNSGKSKLSYNQFKQHILNLSKSQDRISKKKKEYLLEERDINKFEVQKEFINRNLVDTRYATAELTNYLKAYFSANNMNVKVKTINGSFTDYLRKVWKFKKERNHGYKHHAEDALIIANADFLFKENKKLKAVNSVLEKPEIETKQLDIQVDSEDNYSEMFIIPKQVQDIKDFRNFKYSHRVDKKPNRKLINDTLYSTRKKDNSTYIVQTIKDIYAKDNTTLKKQFDKSPEKFLMYQHDPRTFEKLEVIMKQYANEKNPLAKYHEETGEYLTKYSKKNNGPIVKSLKYIGNKLGSHLDVTHQFKSSTKKLVKLSIKPYRFDVYLTDKGYKFITISYLDVLKKDNYYYIPEQKYDKLKLGKAIDKNAKFIASFYKNDLIKLDGEIYKIIGVNSDTRNMIELDLPDIRYKEYCELNNIKGEPHIKKTIGKKVNSIEKLTTDVLGNVFTNTQYTKPQLLFKRGN

SEQ ID NO: 721 - skipped

SEQ ID NO: 722 - DNA, 27 bp, synthetic construct
  misc_feature 1..27: note = Synthetic
  source 1..27: mol_type = other DNA
ccggcagctaagaaaaagaaactggat

SEQ ID NO: 723 - DNA, 54 bp, unidentified
  misc_feature 1..54: note = SV40 NLS
  source 1..54: mol_type = unassigned DNA
atgatggccccaaagaagaagcggaaggtcggtatccacggagtcccagcagcc

SEQ ID NO: 724-899 - skipped (176 entries)

SEQ ID NO: 900 - DNA, 77 bp, synthetic construct
  misc_feature 1..77: note = Synthetic
  source 1..77: mol_type = other DNA
gttttagtactctggaaacagaatctactgaaacaagacaatatgtcgtgtttatcccatcaatttattggtgggat

SEQ ID NO: 901 - DNA, 77 bp, synthetic construct
  misc_feature 1..77: note = Synthetic
  source 1..77: mol_type = other DNA
gtttcagtactctggaaacagaatctactgaaacaagacaatatgtcgtgtttatcccatcaatttattggtgggat

SEQ ID NO: 902 - DNA, 77 bp, synthetic construct
  misc_feature 1..77: note = Synthetic
  source 1..77: mol_type = other DNA
gtttggtaacctaggaaactagatcttaccaaacaagacaatatgtcgtgtttatcccatcaatttattggtgggat

SEQ ID NO: 903 - DNA, 77 bp, synthetic construct
  misc_feature 1..77: note = Synthetic
  source 1..77: mol_type = other DNA
gtttcagtactctggaaacagaatctactgaaacaaggcaaaatgccgtgtttatcccatcaatttattggtgggat

SEQ ID NO: 904 - DNA, 77 bp, synthetic construct
  misc_feature 1..77: note = Synthetic
  source 1..77: mol_type = other DNA
gtttcagtactctggaaacagaatctactgaaacaagacaatatgtcgcgcccatcccatcaatttattggtgggat

SEQ ID NO: 905 - DNA, 77 bp, synthetic construct
  misc_feature 1..77: note = Synthetic
  source 1..77: mol_type = other DNA
gtttcagtactctggaaacagaatctactgaaacaagacaatatgtcgtgtttatgggttgaatttattcgacccat

SEQ ID NO: 906 - DNA, 77 bp, synthetic construct
  misc_feature 1..77: note = Synthetic
  source 1..77: mol_type = other DNA
gtttggtaacctaggaaactagatcttaccaaacaaggcaaaatgccgtgtttatcccatcaatttattggtgggat

SEQ ID NO: 907 - DNA, 77 bp, synthetic construct
  misc_feature 1..77: note = Synthetic
  source 1..77: mol_type = other DNA
gtttggtaacctaggaaactagatcttaccaaacaagacaatatgtcgcgcccatcccatcaatttattggtgggat

SEQ ID NO: 908 - DNA, 77 bp, synthetic construct
  misc_feature 1..77: note = Synthetic
  source 1..77: mol_type = other DNA
gtttggtaacctaggaaactagatcttaccaaacaagacaatatgtcgtgtttatgggttgaatttattcgacccat

SEQ ID NO: 909 - DNA, 77 bp, synthetic construct
  misc_feature 1..77: note = Synthetic
  source 1..77: mol_type = other DNA
gtttcagtactctggaaacagaatctactgaaacaaggcaaaatgccgcgcccatcccatcaatttattggtgggat

SEQ ID NO: 910 - DNA, 77 bp, synthetic construct
  misc_feature 1..77: note = Synthetic
  source 1..77: mol_type = other DNA
gtttcagtactctggaaacagaatctactgaaacaaggcaaaatgccgtgtttatgggttgaatttattcgacccat

SEQ ID NO: 911 - DNA, 77 bp, synthetic construct
  misc_feature 1..77: note = Synthetic
  source 1..77: mol_type = other DNA
gtttcagtactctggaaacagaatctactgaaacaagacaatatgtcgcgcccatgggttgaatttattcgacccat

SEQ ID NO: 912 - DNA, 77 bp, synthetic construct
  misc_feature 1..77: note = Synthetic
  source 1..77: mol_type = other DNA
gtttggtaacctaggaaactagatcttaccaaacaaggcaaaatgccgcgcccatcccatcaatttattggtgggat

SEQ ID NO: 913 - DNA, 77 bp, synthetic construct
  misc_feature 1..77: note = Synthetic
  source 1..77: mol_type = other DNA
gtttggtaacctaggaaactagatcttaccaaacaaggcaaaatgccgtgtttatgggttgaatttattcgacccat

SEQ ID NO: 914 - DNA, 77 bp, synthetic construct
  misc_feature 1..77: note = Synthetic
  source 1..77: mol_type = other DNA
gtttggtaacctaggaaactagatcttaccaaacaagacaatatgtcgcgcccatgggttgaatttattcgacccat

SEQ ID NO: 915 - DNA, 77 bp, synthetic construct
  misc_feature 1..77: note = Synthetic
  source 1..77: mol_type = other DNA
gtttcagtactctggaaacagaatctactgaaacaaggcaaaatgccgcgcccatgggttgaatttattcgacccat

SEQ ID NO: 916 - DNA, 77 bp, synthetic construct
  misc_feature 1..77: note = Synthetic
  source 1..77: mol_type = other DNA
gtttggtaacctaggaaactagatcttaccaaacaaggcaaaatgccgcgcccatgggttgaatttattcgacccat

SEQ ID NO: 917 - DNA, 87 bp, synthetic construct
  misc_feature 1..87: note = Synthetic
  source 1..87: mol_type = other DNA
gtttcagtactctgtgctggaaacagcacagaatctactgaaacaagacaatatgtcgtgtttatcccatcaatttattggtgggat

SEQ ID NO: 918-941 - skipped (24 entries)

SEQ ID NO: 942 - protein, 9 aa, synthetic construct
  REGION 1..9: note = Synthetic
PAAKKKKLD

SEQ ID NO: 943-999 - skipped (57 entries)

SEQ ID NO: 1000 - DNA, 22 bp, synthetic construct
  misc_feature 1..22: note = Synthetic
  source 1..22: mol_type = other DNA
cgaaggtaattgcctcccagat

SEQ ID NO: 1001 - DNA, 22 bp, synthetic construct
  misc_feature 1..22: note = Synthetic
  source 1..22: mol_type = other DNA
atctgagtcctgtagggggaaa

SEQ ID NO: 1002 - DNA, 22 bp, synthetic construct
  misc_feature 1..22: note = Synthetic
  source 1..22: mol_type = other DNA
aggcaattaccttcggagaaaa

SEQ ID NO: 1003 - DNA, 22 bp, synthetic construct
  misc_feature 1..22: note = Synthetic
  source 1..22: mol_type = other DNA
aaattgtgcatttacccatttt

SEQ ID NO: 1004 - DNA, 22 bp, synthetic construct
  misc_feature 1..22: note = Synthetic
  source 1..22: mol_type = other DNA
taaatgcacaattttctaaggt

SEQ ID NO: 1005 - DNA, 22 bp, synthetic construct
  misc_feature 1..22: note = Synthetic
  source 1..22: mol_type = other DNA
ttcaaaagaaaacattcacaaa

SEQ ID NO: 1006 - DNA, 22 bp, synthetic construct
  misc_feature 1..22: note = Synthetic
  source 1..22: mol_type = other DNA
tgagaacctcttcagtgaccta

SEQ ID NO: 1007 - DNA, 22 bp, synthetic construct
  misc_feature 1..22: note = Synthetic
  source 1..22: mol_type = other DNA
attgttcagggcatgaactctt

SEQ ID NO: 1008 - DNA, 22 bp, synthetic construct
  misc_feature 1..22: note = Synthetic
  source 1..22: mol_type = other DNA
tgaacaatgtcaacaaggcact

SEQ ID NO: 1009 - DNA, 22 bp, synthetic construct
  misc_feature 1..22: note = Synthetic
  source 1..22: mol_type = other DNA
agccaaaagaaaaaggatccac

SEQ ID NO: 1010 - DNA, 22 bp, synthetic construct
  misc_feature 1..22: note = Synthetic
  source 1..22: mol_type = other DNA
ttttgttctcagccaaaagaaa

SEQ ID NO: 1011 - DNA, 22 bp, synthetic construct
  misc_feature 1..22: note = Synthetic
  source 1..22: mol_type = other DNA
tcaggattcttacctgccagtg

SEQ ID NO: 1012 - DNA, 22 bp, synthetic construct
  misc_feature 1..22: note = Synthetic
  source 1..22: mol_type = other DNA
ggattatattccaaatcaaacc

SEQ ID NO: 1013 - DNA, 22 bp, synthetic construct
  misc_feature 1..22: note = Synthetic
  source 1..22: mol_type = other DNA
atataatcctccactggcaggt

SEQ ID NO: 1014 - DNA, 22 bp, synthetic construct
  misc_feature 1..22: note = Synthetic
  source 1..22: mol_type = other DNA
taaactgactcttggtttgatt

SEQ ID NO: 1015 - DNA, 22 bp, synthetic construct
  misc_feature 1..22: note = Synthetic
  source 1..22: mol_type = other DNA
ctttctttaacaggttgattta

SEQ ID NO: 1016 - DNA, 22 bp, synthetic construct
  misc_feature 1..22: note = Synthetic
  source 1..22: mol_type = other DNA
agtaatcttcttacctatgact

SEQ ID NO: 1017 - DNA, 22 bp, synthetic construct
  misc_feature 1..22: note = Synthetic
  source 1..22: mol_type = other DNA
gtgaagttgattacattaacct

SEQ ID NO: 1018 - DNA, 22 bp, synthetic construct
  misc_feature 1..22: note = Synthetic
  source 1..22: mol_type = other DNA
ttacattaacctgtggataatt

SEQ ID NO: 1019 - DNA, 22 bp, synthetic construct
  misc_feature 1..22: note = Synthetic
  source 1..22: mol_type = other DNA
ttgattgtcggacccagctcag

SEQ ID NO: 1020 - DNA, 22 bp, synthetic construct
  misc_feature 1..22: note = Synthetic
  source 1..22: mol_type = other DNA
cagctggtctgatggcctggct

SEQ ID NO: 1021 - DNA, 22 bp, synthetic construct
  misc_feature 1..22: note = Synthetic
  source 1..22: mol_type = other DNA
acagtgaaaagattctcctgag

SEQ ID NO: 1022 - DNA, 22 bp, synthetic construct
  misc_feature 1..22: note = Synthetic
  source 1..22: mol_type = other DNA
aatgtaatgaaaaatatcatgg

SEQ ID NO: 1023 - DNA, 22 bp, synthetic construct
  misc_feature 1..22: note = Synthetic
  source 1..22: mol_type = other DNA
agtccagaaatttaccaacctt

SEQ ID NO: 1024 - DNA, 22 bp, synthetic construct
  misc_feature 1..22: note = Synthetic
  source 1..22: mol_type = other DNA
agaaatttaccaaccttcagga

SEQ ID NO: 1025 - DNA, 22 bp, synthetic construct
  misc_feature 1..22: note = Synthetic
  source 1..22: mol_type = other DNA
gcctaattgatatctggcgatg

SEQ ID NO: 1026 - DNA, 22 bp, synthetic construct
  misc_feature 1..22: note = Synthetic
  source 1..22: mol_type = other DNA
ttttaggccagacctatttgac

SEQ ID NO: 1027 - DNA, 22 bp, synthetic construct
  misc_feature 1..22: note = Synthetic
  source 1..22: mol_type = other DNA
tcctttacacactttacctgtt

SEQ ID NO: 1028 - DNA, 22 bp, synthetic construct
  misc_feature 1..22: note = Synthetic
  source 1..22: mol_type = other DNA
gccttggcaacatttccacttc

SEQ ID NO: 1029 - DNA, 22 bp, synthetic construct
  misc_feature 1..22: note = Synthetic
  source 1..22: mol_type = other DNA
cacttgttgaggcaaaacttgg

SEQ ID NO: 1030 - DNA, 22 bp, synthetic construct
  misc_feature 1..22: note = Synthetic
  source 1..22: mol_type = other DNA
tacattaagatggacttcttat

SEQ ID NO: 1031 - DNA, 22 bp, synthetic construct
  misc_feature 1..22: note = Synthetic
  source 1..22: mol_type = other DNA
tgtgaaggaaatgggctccgtg

SEQ ID NO: 1032 - DNA, 22 bp, synthetic construct
  misc_feature 1..22: note = Synthetic
  source 1..22: mol_type = other DNA
agcctgtgtgtaggcatagctc

SEQ ID NO: 1033 - DNA, 22 bp, synthetic construct
  misc_feature 1..22: note = Synthetic
  source 1..22: mol_type = other DNA
cagatcacggtcagtctagcac

SEQ ID NO: 1034 - DNA, 22 bp, synthetic construct
  misc_feature 1..22: note = Synthetic
  source 1..22: mol_type = other DNA
aattaacgttttagtttacctc

SEQ ID NO: 1035 - DNA, 22 bp, synthetic construct
  misc_feature 1..22: note = Synthetic
  source 1..22: mol_type = other DNA
gtcatttggcagttcattgatg

SEQ ID NO: 1036 - DNA, 22 bp, synthetic construct
  misc_feature 1..22: note = Synthetic
  source 1..22: mol_type = other DNA
gctaccctgaggcattcccatc

SEQ ID NO: 1037 - DNA, 22 bp, synthetic construct
  misc_feature 1..22: note = Synthetic
  source 1..22: mol_type = other DNA
caatcagcttacttcccaattg

SEQ ID NO: 1038 - DNA, 22 bp, synthetic construct
  misc_feature 1..22: note = Synthetic
  source 1..22: mol_type = other DNA
taaattcaagatgggaatgcct

SEQ ID NO: 1039 - DNA, 22 bp, synthetic construct
  misc_feature 1..22: note = Synthetic
  source 1..22: mol_type = other DNA
atgaatctcctaaattcaagat

SEQ ID NO: 1040 - DNA, 22 bp, synthetic construct
  misc_feature 1..22: note = Synthetic
  source 1..22: mol_type = other DNA
agaaactgaagtacaagagcag

SEQ ID NO: 1041 - DNA, 22 bp, synthetic construct
  misc_feature 1..22: note = Synthetic
  source 1..22: mol_type = other DNA
tggatttgacagcccatcaggg

SEQ ID NO: 1042 - DNA, 22 bp, synthetic construct
  misc_feature 1..22: note = Synthetic
  source 1..22: mol_type = other DNA
ccttctttgtcaggggtacatg

SEQ ID NO: 1043 - DNA, 22 bp, synthetic construct
  misc_feature 1..22: note = Synthetic
  source 1..22: mol_type = other DNA
ccagaatcagaaactgaaagag

SEQ ID NO: 1044 - DNA, 22 bp, synthetic construct
  misc_feature 1..22: note = Synthetic
  source 1..22: mol_type = other DNA
gatctccagaatcagaaactga

SEQ ID NO: 1045 - DNA, 22 bp, synthetic construct
  misc_feature 1..22: note = Synthetic
  source 1..22: mol_type = other DNA
acatagagttttaatggatctc

SEQ ID NO: 1046 - DNA, 22 bp, synthetic construct
  misc_feature 1..22: note = Synthetic
  source 1..22: mol_type = other DNA
tttcagtttacatagagtttta

SEQ ID NO: 1047 - DNA, 22 bp, synthetic construct
  misc_feature 1..22: note = Synthetic
  source 1..22: mol_type = other DNA
tctttcaaattttcagtttaca

SEQ ID NO: 1048 - DNA, 22 bp, synthetic construct
  misc_feature 1..22: note = Synthetic
  source 1..22: mol_type = other DNA
attcatcaactaccaccaccat

SEQ ID NO: 1049 - DNA, 22 bp, synthetic construct
  misc_feature 1..22: note = Synthetic
  source 1..22: mol_type = other DNA
actaccaccaccatgtgagtga

SEQ ID NO: 1050 - DNA, 22 bp, synthetic construct
  misc_feature 1..22: note = Synthetic
  source 1..22: mol_type = other DNA
actcacatggtggtggtagttg

SEQ ID NO: 1051 - DNA, 22 bp, synthetic construct
  misc_feature 1..22: note = Synthetic
  source 1..22: mol_type = other DNA
aagatctagaacaagaacaagt

SEQ ID NO: 1052 - DNA, 22 bp, synthetic construct
  misc_feature 1..22: note = Synthetic
  source 1..22: mol_type = other DNA
cagtaagacgttgccatttgag

SEQ ID NO: 1053 - DNA, 22 bp, synthetic construct
  misc_feature 1..22: note = Synthetic
  source 1..22: mol_type = other DNA
tctgtagatggacagaagaccg

SEQ ID NO: 1054 - DNA, 22 bp, synthetic construct
  misc_feature 1..22: note = Synthetic
  source 1..22: mol_type = other DNA
tttgatctttaaagccagttgt

SEQ ID NO: 1055 - DNA, 22 bp, synthetic construct
  misc_feature 1..22: note = Synthetic
  source 1..22: mol_type = other DNA
tatccagccatgcttccgtctt

SEQ ID NO: 1056 - DNA, 22 bp, synthetic construct
  misc_feature 1..22: note = Synthetic
  source 1..22: mol_type = other DNA
cagtgttgaaagaagatcttgt

SEQ ID NO: 1057 - DNA, 22 bp, synthetic construct
  misc_feature 1..22: note = Synthetic
  source 1..22: mol_type = other DNA
gttgaaagaagatcttgtttga

SEQ ID NO: 1058 - DNA, 22 bp, synthetic construct
  misc_feature 1..22: note = Synthetic
  source 1..22: mol_type = other DNA
tttgagtgaatacagtttgccc

SEQ ID NO: 1059 - DNA, 22 bp, synthetic construct
  misc_feature 1..22: note = Synthetic
  source 1..22: mol_type = other DNA
taatttagtccaaaaacttgaa

SEQ ID NO: 1060 - DNA, 22 bp, synthetic construct
  misc_feature 1..22: note = Synthetic
  source 1..22: mol_type = other DNA
gctggataactttgcccggtgt

SEQ ID NO: 1061 - DNA, 22 bp, synthetic construct
  misc_feature 1..22: note = Synthetic
  source 1..22: mol_type = other DNA
gacccagaagacggaagcatgg

SEQ ID NO: 1062 - DNA, 22 bp, synthetic construct
  misc_feature 1..22: note = Synthetic
  source 1..22: mol_type = other DNA
acaagatcttctttcaacactg

SEQ ID NO: 1063 - DNA, 22 bp, synthetic construct
  misc_feature 1..22: note = Synthetic
  source 1..22: mol_type = other DNA
cttgttttaacaggttttaaaa

SEQ ID NO: 1064 - DNA, 22 bp, synthetic construct
  misc_feature 1..22: note = Synthetic
  source 1..22: mol_type = other DNA
tgctctcaccttttcctaattt

SEQ ID NO: 1065 - DNA, 22 bp, synthetic construct
  misc_feature 1..22: note = Synthetic
  source 1..22: mol_type = other DNA
gttcctcttgagcatgctttac

SEQ ID NO: 1066 - DNA, 22 bp, synthetic construct
  misc_feature 1..22: note = Synthetic
  source 1..22: mol_type = other DNA
cagttgtctgtgttagtgatgg

SEQ ID NO: 1067 - DNA, 22 bp, synthetic construct
  misc_feature 1..22: note = Synthetic
  source 1..22: mol_type = other DNA
ccaaaagaagaggcagattact

SEQ ID NO: 1068 - DNA, 22 bp, synthetic construct
  misc_feature 1..22: note = Synthetic
  source 1..22: mol_type = other DNA
gactctgcaacacagcttctga

SEQ ID NO: 1069 - DNA, 22 bp, synthetic construct
  misc_feature 1..22: note = Synthetic
  source 1..22: mol_type = other DNA
tcagaagctgtgttgcagagtc

SEQ ID NO: 1070 - DNA, 22 bp, synthetic construct
  misc_feature 1..22: note = Synthetic
  source 1..22: mol_type = other DNA
tactcgctcagaagctgtgttg

SEQ ID NO: 1071 - DNA, 22 bp, synthetic construct
  misc_feature 1..22: note = Synthetic
  source 1..22: mol_type = other DNA
ttgatataactgaacttcacag

SEQ ID NO: 1072 - DNA, 22 bp, synthetic construct
  misc_feature 1..22: note = Synthetic
  source 1..22: mol_type = other DNA
tcaggccctggtggaacagatg

SEQ ID NO: 1073 - DNA, 22 bp, synthetic construct
  misc_feature 1..22: note = Synthetic
  source 1..22: mol_type = other DNA
ttttaattgctgttggctctga

SEQ ID NO: 1074 - DNA, 22 bp, synthetic construct
  misc_feature 1..22: note = Synthetic
  source 1..22: mol_type = other DNA
tgctgttggctctgatggggtg

SEQ ID NO: 1075 - DNA, 22 bp, synthetic construct
  misc_feature 1..22: note = Synthetic
  source 1..22: mol_type = other DNA
ttggctctgatggggtggtggg

SEQ ID NO: 1076 - DNA, 22 bp, synthetic construct
  misc_feature 1..22: note = Synthetic
  source 1..22: mol_type = other DNA
aagtctctcacttagcaactgg

SEQ ID NO: 1077 - DNA, 22 bp, synthetic construct
  misc_feature 1..22: note = Synthetic
  source 1..22: mol_type = other DNA
gtcagttaaaaatttgtaaggt

SEQ ID NO: 1078 - DNA, 22 bp, synthetic construct
  misc_feature 1..22: note = Synthetic
  source 1..22: mol_type = other DNA
ctaagtgagagacttaactggc

SEQ ID NO: 1079 - DNA, 22 bp, synthetic construct
  misc_feature 1..22: note = Synthetic
  source 1..22: mol_type = other DNA
gaacaactgaacagccggtgga

SEQ ID NO: 1080 - DNA, 22 bp, synthetic construct
  misc_feature 1..22: note = Synthetic
  source 1..22: mol_type = other DNA
cctcagaacaactgaacagccg

SEQ ID NO: 1081 - DNA, 22 bp, synthetic construct
  misc_feature 1..22: note = Synthetic
  source 1..22: mol_type = other DNA
cacaaagtctgcatccaggaac

SEQ ID NO: 1082 - DNA, 22 bp, synthetic construct
  misc_feature 1..22: note = Synthetic
  source 1..22: mol_type = other DNA
ctttctctttcagggctatgct

SEQ ID NO: 1083 - DNA, 22 bp, synthetic construct
  misc_feature 1..22: note = Synthetic
  source 1..22: mol_type = other DNA
gaaaggacaaggacccatgttc

SEQ ID NO: 1084 - DNA, 22 bp, synthetic construct
  misc_feature 1..22: note = Synthetic
  source 1..22: mol_type = other DNA
atattcacagacctgcaattcc

SEQ ID NO: 1085 - DNA, 22 bp, synthetic construct
  misc_feature 1..22: note = Synthetic
  source 1..22: mol_type = other DNA
ggtgacactaagttgaggtatg

SEQ ID NO: 1086 - DNA, 22 bp, synthetic construct
  misc_feature 1..22: note = Synthetic
  source 1..22: mol_type = other DNA
gaaatcatggagcagagactcg

SEQ ID NO: 1087 - DNA, 22 bp, synthetic construct
  misc_feature 1..22: note = Synthetic
  source 1..22: mol_type = other DNA
agaccatgagtgccatcaggac

SEQ ID NO: 1088 - DNA, 22 bp, synthetic construct
  misc_feature 1..22: note = Synthetic
  source 1..22: mol_type = other DNA
accaatgcgctatcaggagacc

SEQ ID NO: 1089 - DNA, 22 bp, synthetic construct
  misc_feature 1..22: note = Synthetic
  source 1..22: mol_type = other DNA
atcttgaattacctgaattttt

SEQ ID NO: 1090 - DNA, 22 bp, synthetic construct
  misc_feature 1..22: note = Synthetic
  source 1..22: mol_type = other DNA
ttgtcaaaagctagaggagcaa

SEQ ID NO: 1091 - DNA, 22 bp, synthetic construct
  misc_feature 1..22: note = Synthetic
  source 1..22: mol_type = other DNA
gaaattagccggaaatatcaat

SEQ ID NO: 1092 - DNA, 22 bp, synthetic construct
  misc_feature 1..22: note = Synthetic
  source 1..22: mol_type = other DNA
tgcactgtttcagctgcttttt

SEQ ID NO: 1093 - DNA, 22 bp, synthetic construct
  misc_feature 1..22: note = Synthetic
  source 1..22: mol_type = other DNA
ttcagctgcttttttagaattt

SEQ ID NO: 1094 - DNA, 22 bp, synthetic construct
  misc_feature 1..22: note = Synthetic
  source 1..22: mol_type = other DNA
caacttcagccatccatttctt

SEQ ID NO: 1095 - DNA, 22 bp, synthetic construct
  misc_feature 1..22: note = Synthetic
  source 1..22: mol_type = other DNA
taaaaaagcagctgaaacagtg

SEQ ID NO: 1096 - DNA, 22 bp, synthetic construct
  misc_feature 1..22: note = Synthetic
  source 1..22: mol_type = other DNA
gaaggaggaatggcctgccctt

SEQ ID NO: 1097 - DNA, 22 bp, synthetic construct
  misc_feature 1..22: note = Synthetic
  source 1..22: mol_type = other DNA
gaagttgatgtttttctgaagg

SEQ ID NO: 1098 - DNA, 22 bp, synthetic construct
  misc_feature 1..22: note = Synthetic
  source 1..22: mol_type = other DNA
atcacatacaaaccctgaagaa

SEQ ID NO: 1099 - DNA, 22 bp, synthetic construct
  misc_feature 1..22: note = Synthetic
  source 1..22: mol_type = other DNA
cctgttggcacatgtgatccca

SEQ ID NO: 1100 - DNA, 22 bp, synthetic construct
  misc_feature 1..22: note = Synthetic
  source 1..22: mol_type = other DNA
atcccactgagtgttaagttct

SEQ ID NO: 1101 - DNA, 22 bp, synthetic construct
  misc_feature 1..22: note = Synthetic
  source 1..22: mol_type = other DNA
cattgacactgtttagactggg

SEQ ID NO: 1102 - DNA, 22 bp, synthetic construct
  misc_feature 1..22: note = Synthetic
  source 1..22: mol_type = other DNA
tgtttagactgggctgaattgt

SEQ ID NO: 1103 - DNA, 22 bp, synthetic construct
  misc_feature 1..22: note = Synthetic
  source 1..22: mol_type = other DNA
actcaaagaacttaacactcag

SEQ ID NO: 1104 - DNA, 22 bp, synthetic construct
  misc_feature 1..22: note = Synthetic
  source 1..22: mol_type = other DNA
aagataaagaatgaagcagagc

SEQ ID NO: 1105 - DNA, 22 bp, synthetic construct
  misc_feature 1..22: note = Synthetic
  source 1..22: mol_type = other DNA
caatgaaggtgggcagaagata

SEQ ID NO: 1106 - DNA, 22 bp, synthetic construct
  misc_feature 1..22: note = Synthetic
  source 1..22: mol_type = other DNA
caactgctttctgtaattcatc

SEQ ID NO: 1107 - DNA, 22 bp, synthetic construct
  misc_feature 1..22: note = Synthetic
  source 1..22: mol_type = other DNA
gattttgaatataaaactccag

SEQ ID NO: 1108 - DNA, 22 bp, synthetic construct
  misc_feature 1..22: note = Synthetic
  source 1..22: mol_type = other DNA
gaagagtatcttgagagagatt

SEQ ID NO: 1109 - DNA, 22 bp, synthetic construct
  misc_feature 1..22: note = Synthetic
  source 1..22: mol_type = other DNA
gaatggatgacacaagctgaag

SEQ ID NO: 1110 - DNA, 22 bp, synthetic construct
  misc_feature 1..22: note = Synthetic
  source 1..22: mol_type = other DNA
aagatctatcagagatgcacga

SEQ ID NO: 1111 - DNA, 22 bp, synthetic construct
  misc_feature 1..22: note = Synthetic
  source 1..22: mol_type = other DNA
cagaaagatctatcagagatgc

SEQ ID NO: 1112 - DNA, 22 bp, synthetic construct
  misc_feature 1..22: note = Synthetic
  source 1..22: mol_type = other DNA
agagccactggtagttggtggt

SEQ ID NO: 1113 - DNA, 22 bp, synthetic construct
  misc_feature 1..22: note = Synthetic
  source 1..22: mol_type = other DNA
gacactatttacagactcagta

SEQ ID NO: 1114 - DNA, 22 bp, synthetic construct
  misc_feature 1..22: note = Synthetic
  source 1..22: mol_type = other DNA
ctaccagtggctctgcactagg

SEQ ID NO: 1115 - DNA, 22 bp, synthetic construct
  misc_feature 1..22: note = Synthetic
  source 1..22: mol_type = other DNA
gaagcgaaagtgaaactcctta

SEQ ID NO: 1116 - DNA, 22 bp, synthetic construct
  misc_feature 1..22: note = Synthetic
  source 1..22: mol_type = other DNA
cagagatttcctcagctccgcc

SEQ ID NO: 1117 - DNA, 22 bp, synthetic construct
  misc_feature 1..22: note = Synthetic
  source 1..22: mol_type = other DNA
gcaaacaagtggctaaatgaag

SEQ ID NO: 1118 - DNA, 22 bp, synthetic construct
  misc_feature 1..22: note = Synthetic
  source 1..22: mol_type = other DNA
taggaagtttgggcatgttggc

SEQ ID NO: 1119 - DNA, 22 bp, synthetic construct
  misc_feature 1..22: note = Synthetic
  source 1..22: mol_type = other DNA
tcttcatgtagttccctccaac

SEQ ID NO: 1120 - DNA, 22 bp, synthetic construct
  misc_feature 1..22: note = Synthetic
  source 1..22: mol_type = other DNA
catccatgactccgccatctgt

SEQ ID NO: 1121 - DNA, 22 bp, synthetic construct
  misc_feature 1..22: note = Synthetic
  source 1..22: mol_type = other DNA
ctgttagggtctgtgccaatat

SEQ ID NO: 1122 - DNA, 22 bp, synthetic construct
  misc_feature 1..22: note = Synthetic
  source 1..22: mol_type = other DNA
tgtgccaatatgcgaatctgat

SEQ ID NO: 1123 - DNA, 22 bp, synthetic construct
  misc_feature 1..22: note = Synthetic
  source 1..22: mol_type = other DNA
cgaatctgatttgggttatcct

SEQ ID NO: 1124 - DNA, 22 bp, synthetic construct
  misc_feature 1..22: note = Synthetic
  source 1..22: mol_type = other DNA
gaccctaacagatggcggagtc

SEQ ID NO: 1125 - DNA, 22 bp, synthetic construct
  misc_feature 1..22: note = Synthetic
  source 1..22: mol_type = other DNA
tggcacagaccctaacagatgg

SEQ ID NO: 1126 - DNA, 22 bp, synthetic construct
  misc_feature 1..22: note = Synthetic
  source 1..22: mol_type = other DNA
tgaaaatttgatgcgacattca

SEQ ID NO: 1127 - DNA, 22 bp, synthetic construct
  misc_feature 1..22: note = Synthetic
  source 1..22: mol_type = other DNA
ataagctgccaactgcttgtca

SEQ ID NO: 1128 - DNA, 22 bp, synthetic construct
  misc_feature 1..22: note = Synthetic
  source 1..22: mol_type = other DNA
tgtcaatgaatgtgagggactc

SEQ ID NO: 1129 - DNA, 22 bp, synthetic construct
  misc_feature 1..22: note = Synthetic
  source 1..22: mol_type = other DNA
gagggactcctggattaagtgt

SEQ ID NO: 1130 - DNA, 22 bp, synthetic construct
  misc_feature 1..22: note = Synthetic
  source 1..22: mol_type = other DNA
atttttcagtctcctgggcaga

SEQ ID NO: 1131 - DNA, 22 bp, synthetic construct
  misc_feature 1..22: note = Synthetic
  source 1..22: mol_type = other DNA
gaaaaatccttacacttaatcc

SEQ ID NO: 1132 - DNA, 22 bp, synthetic construct
  misc_feature 1..22: note = Synthetic
  source 1..22: mol_type = other DNA
tctcatgacttgtcaaatcaga

SEQ ID NO: 1133 - DNA, 22 bp, synthetic construct
  misc_feature 1..22: note = Synthetic
  source 1..22: mol_type = other DNA
atcaggggaaggaggctgccca

SEQ ID NO: 1134 - DNA, 22 bp, synthetic construct
  misc_feature 1..22: note = Synthetic
  source 1..22: mol_type = other DNA
ctgctcaaaattggctggtttc

SEQ ID NO: 1135 - DNA, 22 bp, synthetic construct
  misc_feature 1..22: note = Synthetic
  source 1..22: mol_type = other DNA
gcacttgcctgcattggaaaca

SEQ ID NO: 1136 - DNA, 22 bp, synthetic construct
  misc_feature 1..22: note = Synthetic
  source 1..22: mol_type = other DNA
gttactctttcatcaagttctt

SEQ ID NO: 1137 - DNA, 22 bp, synthetic construct
  misc_feature 1..22: note = Synthetic
  source 1..22: mol_type = other DNA
aaaatcccaaagaacttgatga

SEQ ID NO: 1138 - DNA, 22 bp, synthetic construct
  misc_feature 1..22: note = Synthetic
  source 1..22: mol_type = other DNA
aacttagaacttgtataaaagt

SEQ ID NO: 1139 - DNA, 22 bp, synthetic construct
  misc_feature 1..22: note = Synthetic
  source 1..22: mol_type = other DNA
tttacctttccccaggcaactt

SEQ ID NO: 1140 - DNA, 22 bp, synthetic construct
  misc_feature 1..22: note = Synthetic
  source 1..22: mol_type = other DNA
agttgaaggaatgcctagtaat

SEQ ID NO: 1141 - DNA, 22 bp, synthetic construct
  misc_feature 1..22: note = Synthetic
  source 1..22: mol_type = other DNA
tgacaaagagatcagcagttga

SEQ ID NO: 1142 - DNA, 22 bp, synthetic construct
  misc_feature 1..22: note = Synthetic
  source 1..22: mol_type = other DNA
gaatggctggcagctacagata

SEQ ID NO: 1143 - DNA, 22 bp, synthetic construct
  misc_feature 1..22: note = Synthetic
  source 1..22: mol_type = other DNA
cgaaaggaaatgaatgtcttga

SEQ ID NO: 1144 - DNA, 22 bp, synthetic construct
  misc_feature 1..22: note = Synthetic
  source 1..22: mol_type = other DNA
gtcccgtaagatgcgaaaggaa

SEQ ID NO: 1145 - DNA, 22 bp, synthetic construct
  misc_feature 1..22: note = Synthetic
  source 1..22: mol_type = other DNA
tatccagttactattcagaaga

SEQ ID NO: 1146 - DNA, 22 bp, synthetic construct
  misc_feature 1..22: note = Synthetic
  source 1..22: mol_type = other DNA
ccttctgtttctcaatctcttt

SEQ ID NO: 1147 - DNA, 22 bp, synthetic construct
  misc_feature 1..22: note = Synthetic
  source 1..22: mol_type = other DNA
atagctgtcacctcccgagcag

SEQ ID NO: 1148 - DNA, 22 bp, synthetic construct
  misc_feature 1..22: note = Synthetic
  source 1..22: mol_type = other DNA
aactcagtcttctgaatagtaa

SEQ ID NO: 1149 - DNA, 22 bp, synthetic construct
  misc_feature 1..22: note = Synthetic
  source 1..22: mol_type = other DNA
ggtggaagataaactcagtctt

SEQ ID NO: 1150 - DNA, 22 bp, synthetic construct
  misc_feature 1..22: note = Synthetic
  source 1..22: mol_type = other DNA
tgagaaacagaaggtgcacctg

SEQ ID NO: 1151 - DNA, 22 bp, synthetic construct
  misc_feature 1..22: note = Synthetic
  source 1..22: mol_type = other DNA
cttaagcacgtcttctttttgc

SEQ ID NO: 1152 - DNA, 22 bp, synthetic construct
  misc_feature 1..22: note = Synthetic
  source 1..22: mol_type = other DNA
attcatccaaaagtgtgtcagc

SEQ ID NO: 1153 - DNA, 22 bp, synthetic construct
  misc_feature 1..22: note = Synthetic
  source 1..22: mol_type = other DNA
attcaggctgacacacttttgg

SEQ ID NO: 1154 - DNA, 22 bp, synthetic construct
  misc_feature 1..22: note = Synthetic
  source 1..22: mol_type = other DNA
gatcattcaggctgacacactt

SEQ ID NO: 1155 - DNA, 22 bp, synthetic construct
  misc_feature 1..22: note = Synthetic
  source 1..22: mol_type = other DNA
agaatgtggaccacatcacaaa

SEQ ID NO: 1156 - DNA, 22 bp, synthetic construct
  misc_feature 1..22: note = Synthetic
  source 1..22: mol_type = other DNA
gaaacacatggaaacttttgac

SEQ ID NO: 1157 - DNA, 22 bp, synthetic construct
  misc_feature 1..22: note = Synthetic
  source 1..22: mol_type = other DNA
aagtttgctgcttggtcacgtg

SEQ ID NO: 1158 - DNA, 22 bp, synthetic construct
  misc_feature 1..22: note = Synthetic
  source 1..22: mol_type = other DNA
atcgatttgcagccatttcaca

SEQ ID NO: 1159 - DNA, 22 bp, synthetic construct
  misc_feature 1..22: note = Synthetic
  source 1..22: mol_type = other DNA
aatatagcgtttaaaggcagaa

SEQ ID NO: 1160 - DNA, 22 bp, synthetic construct
  misc_feature 1..22: note = Synthetic
  source 1..22: mol_type = other DNA
cctctttcagattcaccccctg

SEQ ID NO: 1161 - DNA, 22 bp, synthetic construct
  misc_feature 1..22: note = Synthetic
  source 1..22: mol_type = other DNA
ggttcaagcaatttttgtatat

SEQ ID NO: 1162 - DNA, 22 bp, synthetic construct
  misc_feature 1..22: note = Synthetic
  source 1..22: mol_type = other DNA
taaactgctccaattccttcaa

SEQ ID NO: 1163 - DNA, 22 bp, synthetic construct
  misc_feature 1..22: note = Synthetic
  source 1..22: mol_type = other DNA
ggaggctgaaattcagcagggg

SEQ ID NO: 1164 - DNA, 22 bp, synthetic construct
  misc_feature 1..22: note = Synthetic
  source 1..22: mol_type = other DNA
cactggaggctgaaattcagca

SEQ ID NO: 1165 - DNA, 22 bp, synthetic construct
  misc_feature 1..22: note = Synthetic
  source 1..22: mol_type = other DNA
ttttaggcctccattcctttga

SEQ ID NO: 1166 - DNA, 22 bp, synthetic construct
  misc_feature 1..22: note = Synthetic
  source 1..22: mol_type = other DNA
aaagaggagacaacttacaaca

SEQ ID NO: 1167 - DNA, 22 bp, synthetic construct
  misc_feature 1..22: note = Synthetic
  source 1..22: mol_type = other DNA
gaagacaatgagggtactgtaa

SEQ ID NO: 1168 - DNA, 22 bp, synthetic construct
  misc_feature 1..22: note = Synthetic
  source 1..22: mol_type = other DNA
ttttgatcagaatgaagacaat

SEQ ID NO: 1169 - DNA, 22 bp, synthetic construct
  misc_feature 1..22: note = Synthetic
  source 1..22: mol_type = other DNA
ggctgatgatctcctgaaatgc

SEQ ID NO: 1170 - DNA, 22 bp, synthetic construct
  misc_feature 1..22: note = Synthetic
  source 1..22: mol_type = other DNA
acaactcacaatttgtgcaaag

SEQ ID NO: 1171 - DNA, 22 bp, synthetic construct
  misc_feature 1..22: note = Synthetic
  source 1..22: mol_type = other DNA
tttcccgccagcgcttgctgag

SEQ ID NO: 1172 - DNA, 22 bp, synthetic construct
  misc_feature 1..22: note = Synthetic
  source 1..22: mol_type = other DNA
gccagcgcttgctgagctggat

SEQ ID NO: 1173 - DNA, 22 bp, synthetic construct
  misc_feature 1..22: note = Synthetic
  source 1..22: mol_type = other DNA
aagactcaactttgcacaaatt

SEQ ID NO: 1174 - DNA, 22 bp, synthetic construct
  misc_feature 1..22: note = Synthetic
  source 1..22: mol_type = other DNA
taggcaagctgagggcttgtct

SEQ ID NO: 1175 - DNA, 22 bp, synthetic construct
  misc_feature 1..22: note = Synthetic
  source 1..22: mol_type = other DNA
attgcagaagaagaaagaggag

SEQ ID NO: 1176 - DNA, 22 bp, synthetic construct
  misc_feature 1..22: note = Synthetic
  source 1..22: mol_type = other DNA
tttgctcaataggaaattgatc

SEQ ID NO: 1177 - DNA, 22 bp, synthetic construct
  misc_feature 1..22: note = Synthetic
  source 1..22: mol_type = other DNA
cttctaatagggcttgtgagac

SEQ ID NO: 1178 - DNA, 22 bp, synthetic construct
  misc_feature 1..22: note = Synthetic
  source 1..22: mol_type = other DNA
tttgaagatctctttaagcaag

SEQ ID NO: 1179 - DNA, 22 bp, synthetic construct
  misc_feature 1..22: note = Synthetic
  source 1..22: mol_type = other DNA
gcaatgctgctgtcttcttgct

SEQ ID NO: 1180 - DNA, 22 bp, synthetic construct
  misc_feature 1..22: note = Synthetic
  source 1..22: mol_type = other DNA
aacaaaatgtacaaggaccgac

SEQ ID NO: 1181 - DNA, 22 bp, synthetic construct
  misc_feature 1..22: note = Synthetic
  source 1..22: mol_type = other DNA
tgcaaagtgcaacgcctgtgga

SEQ ID NO: 1182 - DNA, 22 bp, synthetic construct
  misc_feature 1..22: note = Synthetic
  source 1..22: mol_type = other DNA
atagtctacaacaaagctcagg

SEQ ID NO: 1183 - DNA, 22 bp, synthetic construct
  misc_feature 1..22: note = Synthetic
  source 1..22: mol_type = other DNA
gctgctcttttccaggttcaag

SEQ ID NO: 1184 - DNA, 22 bp, synthetic construct
  misc_feature 1..22: note = Synthetic
  source 1..22: mol_type = other DNA
tcagaatttcaaagagatttaa

SEQ ID NO: 1185 - DNA, 22 bp, synthetic construct
  misc_feature 1..22: note = Synthetic
  source 1..22: mol_type = other DNA
gaagaacaaaagaatatcttgt

SEQ ID NO: 1186 - DNA, 22 bp, synthetic construct
  misc_feature 1..22: note = Synthetic
  source 1..22: mol_type = other DNA
tttctccaggctagaagaacaa

SEQ ID NO: 1187 - DNA, 22 bp, synthetic construct
  misc_feature 1..22: note = Synthetic
  source 1..22: mol_type = other DNA
gcttatgggagcacttacaagc

SEQ ID NO: 1188 - DNA, 22 bp, synthetic construct
  misc_feature 1..22: note = Synthetic
  source 1..22: mol_type = other DNA
ctccagtttcatttaattgttt

SEQ ID NO: 1189 - DNA, 22 bp, synthetic construct
  misc_feature 1..22: note = Synthetic
  source 1..22: mol_type = other DNA
agctcaagcagacaaatctcca

SEQ ID NO: 1190 - DNA, 22 bp, synthetic construct
  misc_feature 1..22: note = Synthetic
  source 1..22: mol_type = other DNA
tggaagagttgcccctgcgcca

SEQ ID NO: 1191 - DNA, 22 bp, synthetic construct
  misc_feature 1..22: note = Synthetic
  source 1..22: mol_type = other DNA
tgtctgtttcagttactggtgg

SEQ ID NO: 1192 - DNA, 22 bp, synthetic construct
  misc_feature 1..22: note = Synthetic
  source 1..22: mol_type = other DNA
gctgctgtggttatctcctatt

SEQ ID NO: 1193 - DNA, 22 bp, synthetic construct
  misc_feature 1..22: note = Synthetic
  source 1..22: mol_type = other DNA
gttgcttcattaccttcactgg

SEQ ID NO: 1194 - DNA, 22 bp, synthetic construct
  misc_feature 1..22: note = Synthetic
  source 1..22: mol_type = other DNA
aatagcagttcaagctaaacaa

SEQ ID NO: 1195 - DNA, 22 bp, synthetic construct
  misc_feature 1..22: note = Synthetic
  source 1..22: mol_type = other DNA
tttcaaattttgggcagcggta

SEQ ID NO: 1196 - DNA, 22 bp, synthetic construct
  misc_feature 1..22: note = Synthetic
  source 1..22: mol_type = other DNA
tcaagaggctagaacaatcatt

SEQ ID NO: 1197 - DNA, 22 bp, synthetic construct
  misc_feature 1..22: note = Synthetic
  source 1..22: mol_type = other DNA
tttgttcttacaggcaacaatg

SEQ ID NO: 1198 - DNA, 22 bp, synthetic construct
  misc_feature 1..22: note = Synthetic
  source 1..22: mol_type = other DNA
aataatgtaattcatacctttt

SEQ ID NO: 1199 - DNA, 22 bp, synthetic construct
  misc_feature 1..22: note = Synthetic
  source 1..22: mol_type = other DNA
tggacttttctggtatcatctg

SEQ ID NO: 1200 - DNA, 22 bp, synthetic construct
  misc_feature 1..22: note = Synthetic
  source 1..22: mol_type = other DNA
tggagaagcattcataaaaggt

SEQ ID NO: 1201 - DNA, 22 bp, synthetic construct
  misc_feature 1..22: note = Synthetic
  source 1..22: mol_type = other DNA
cagaaaagtccacatgataaca

SEQ ID NO: 1202 - DNA, 22 bp, synthetic construct
  misc_feature 1..22: note = Synthetic
  source 1..22: mol_type = other DNA
tgacttggccctgaaacttctc

SEQ ID NO: 1203 - DNA, 22 bp, synthetic construct
  misc_feature 1..22: note = Synthetic
  source 1..22: mol_type = other DNA
ttcatcagctcttttactccct

SEQ ID NO: 1204 - DNA, 22 bp, synthetic construct
  misc_feature 1..22: note = Synthetic
  source 1..22: mol_type = other DNA
agtcttctaggagcctttcctt

SEQ ID NO: 1205 - DNA, 22 bp, synthetic construct
  misc_feature 1..22: note = Synthetic
  source 1..22: mol_type = other DNA
gggggaactgttgcagtaatct

SEQ ID NO: 1206 - DNA, 22 bp, synthetic construct
  misc_feature 1..22: note = Synthetic
  source 1..22: mol_type = other DNA
aaaggctcctagaagactccaa

SEQ ID NO: 1207 - DNA, 22 bp, synthetic construct
  misc_feature 1..22: note = Synthetic
  source 1..22: mol_type = other DNA
tgaaacaactgccaatgtccta

SEQ ID NO: 1208 - DNA, 22 bp, synthetic construct
  misc_feature 1..22: note = Synthetic
  source 1..22: mol_type = other DNA
gactgcatcatcggaaccttcc

SEQ ID NO: 1209 - DNA, 22 bp, synthetic construct
  misc_feature 1..22: note = Synthetic
  source 1..22: mol_type = other DNA
catcggaaccttccagggatct

SEQ ID NO: 1210 - DNA, 22 bp, synthetic construct
  misc_feature 1..22: note = Synthetic
  source 1..22: mol_type = other DNA
tttggataacatgaacttcaag

SEQ ID NO: 1211 - DNA, 22 bp, synthetic construct
  misc_feature 1..22: note = Synthetic
  source 1..22: mol_type = other DNA
tgcagtcctgttacaaagacgt

SEQ ID NO: 1212 - DNA, 22 bp, synthetic construct
  misc_feature 1..22: note = Synthetic
  source 1..22: mol_type = other DNA
tcacacagatgtttatcacaac

SEQ ID NO: 1213 - DNA, 22 bp, synthetic construct
  misc_feature 1..22: note = Synthetic
  source 1..22: mol_type = other DNA
ttcagaagcagaacgatgtaca

SEQ ID NO: 1214 - DNA, 22 bp, synthetic construct
  misc_feature 1..22: note = Synthetic
  source 1..22: mol_type = other DNA
gtgtggctacagctgaaagatg

SEQ ID NO: 1215 - DNA, 22 bp, synthetic construct
  misc_feature 1..22: note = Synthetic
  source 1..22: mol_type = other DNA
tcaattacctctgggctcctgg

SEQ ID NO: 1216 - DNA, 22 bp, synthetic construct
  misc_feature 1..22: note = Synthetic
  source 1..22: mol_type = other DNA
tcagaaatattcgtacagtctc

SEQ ID NO: 1217 - DNA, 22 bp, synthetic construct
  misc_feature 1..22: note = Synthetic
  source 1..22: mol_type = other DNA
tcatgagtactcttgagactgt

SEQ ID NO: 1218 - DNA, 22 bp, synthetic construct
  misc_feature 1..22: note = Synthetic
  source 1..22: mol_type = other DNA
gaaaactaaagaacctgtaatc

SEQ ID NO: 1219 - DNA, 22 bp, synthetic construct
  misc_feature 1..22: note = Synthetic
  source 1..22: mol_type = other DNA
ctcatttcacaggccttcaaga

SEQ ID NO: 1220 - DNA, 22 bp, synthetic construct
  misc_feature 1..22: note = Synthetic
  source 1..22: mol_type = other DNA
actttctcgaggtgatcttgga

SEQ ID NO: 1221 - DNA, 22 bp, synthetic construct
  misc_feature 1..22: note = Synthetic
  source 1..22: mol_type = other DNA
gaggagatcgcccacgggctgc

SEQ ID NO: 1222 - DNA, 22 bp, synthetic construct
  misc_feature 1..22: note = Synthetic
  source 1..22: mol_type = other DNA
atccgtggcctcttgaagttcc

SEQ ID NO: 1223 - DNA, 22 bp, synthetic construct
  misc_feature 1..22: note = Synthetic
  source 1..22: mol_type = other DNA
cttgaagttcccggagtctttc

SEQ ID NO: 1224 - DNA, 22 bp, synthetic construct
  misc_feature 1..22: note = Synthetic
  source 1..22: mol_type = other DNA
tctatttttctctgccagtcag

SEQ ID NO: 1225 - DNA, 22 bp, synthetic construct
  misc_feature 1..22: note = Synthetic
  source 1..22: mol_type = other DNA
cctcagcctgctttcgtagaag

SEQ ID NO: 1226 - DNA, 22 bp, synthetic construct
  misc_feature 1..22: note = Synthetic
  source 1..22: mol_type = other DNA
ctgcgccaagctgaggtgatca

SEQ ID NO: 1227 - DNA, 22 bp, synthetic construct
  misc_feature 1..22: note = Synthetic
  source 1..22: mol_type = other DNA
actccgggaacttcaagaggcc

SEQ ID NO: 1228 - DNA, 22 bp, synthetic construct
  misc_feature 1..22: note = Synthetic
  source 1..22: mol_type = other DNA
aagcaggctgaggaggtcaata

SEQ ID NO: 1229 - DNA, 22 bp, synthetic construct
  misc_feature 1..22: note = Synthetic
  source 1..22: mol_type = other DNA
gctgcctcctgaggagagagcc

SEQ ID NO: 1230 - DNA, 22 bp, synthetic construct
  misc_feature 1..22: note = Synthetic
  source 1..22: mol_type = other DNA
tccatctggtgttcaggtcttc

SEQ ID NO: 1231 - DNA, 22 bp, synthetic construct
  misc_feature 1..22: note = Synthetic
  source 1..22: mol_type = other DNA
tgctgaggttatacggtgagag

SEQ ID NO: 1232 - DNA, 22 bp, synthetic construct
  misc_feature 1..22: note = Synthetic
  source 1..22: mol_type = other DNA
cctcccaggtggccgtcgagga

SEQ ID NO: 1233 - DNA, 22 bp, synthetic construct
  misc_feature 1..22: note = Synthetic
  source 1..22: mol_type = other DNA
tcccttcttttcagcgtctgtc

SEQ ID NO: 1234 - DNA, 22 bp, synthetic construct
  misc_feature 1..22: note = Synthetic
  source 1..22: mol_type = other DNA
gactggtagagctctgtcattt

SEQ ID NO: 1235 - DNA, 22 bp, synthetic construct
  misc_feature 1..22: note = Synthetic
  source 1..22: mol_type = other DNA
tgggatggtcccagcaagttgt

SEQ ID NO: 1236 - DNA, 22 bp, synthetic construct
  misc_feature 1..22: note = Synthetic
  source 1..22: mol_type = other DNA
gcaaagggccttctgcagtctt

SEQ ID NO: 1237 - DNA, 22 bp, synthetic construct
  misc_feature 1..22: note = Synthetic
  source 1..22: mol_type = other DNA
tttcatggcagtcctataagct

SEQ ID NO: 1238 - DNA, 22 bp, synthetic construct
  misc_feature 1..22: note = Synthetic
  source 1..22: mol_type = other DNA
gttttccctcttttcagctgac

SEQ ID NO: 1239 - DNA, 22 bp, synthetic construct
  misc_feature 1..22: note = Synthetic
  source 1..22: mol_type = other DNA
tggtcaaacaattaataatctg

SEQ ID NO: 1240 - DNA, 22 bp, synthetic construct
  misc_feature 1..22: note = Synthetic
  source 1..22: mol_type = other DNA
ggatatgtgtctgaactggctg

SEQ ID NO: 1241 - DNA, 22 bp, synthetic construct
  misc_feature 1..22: note = Synthetic
  source 1..22: mol_type = other DNA
tttggtcaacgtccctctctgc

SEQ ID NO: 1242 - DNA, 22 bp, synthetic construct
  misc_feature 1..22: note = Synthetic
  source 1..22: mol_type = other DNA
cctcaagcaaaatgaccagccc

SEQ ID NO: 1243 - DNA, 22 bp, synthetic construct
  misc_feature 1..22: note = Synthetic
  source 1..22: mol_type = other DNA
tgccagttttaaaagacaggac

SEQ ID NO: 1244 - DNA, 22 bp, synthetic construct
  misc_feature 1..22: note = Synthetic
  source 1..22: mol_type = other DNA
ttcataataggggacgaacagg

SEQ ID NO: 1245 - DNA, 22 bp, synthetic construct
  misc_feature 1..22: note = Synthetic
  source 1..22: mol_type = other DNA
tggctcaatgttactgccccca

SEQ ID NO: 1246 - DNA, 22 bp, synthetic construct
  misc_feature 1..22: note = Synthetic
  source 1..22: mol_type = other DNA
atgcaacttcacccaactgtct

SEQ ID NO: 1247 - DNA, 22 bp, synthetic construct
  misc_feature 1..22: note = Synthetic
  source 1..22: mol_type = other DNA
cttcacccaactgtcttggaat

SEQ ID NO: 1248 - DNA, 22 bp, synthetic construct
  misc_feature 1..22: note = Synthetic
  source 1..22: mol_type = other DNA
cccaactgtcttggaatttgga

SEQ ID NO: 1249 - DNA, 22 bp, synthetic construct
  misc_feature 1..22: note = Synthetic
  source 1..22: mol_type = other DNA
ttctatccaaattccaagacag

SEQ ID NO: 1250 - DNA, 22 bp, synthetic construct
  misc_feature 1..22: note = Synthetic
  source 1..22: mol_type = other DNA
ttcaagcaagtggcaagttcaa

SEQ ID NO: 1251 - DNA, 22 bp, synthetic construct
  misc_feature 1..22: note = Synthetic
  source 1..22: mol_type = other DNA
gacgggcagccacaccatggac

SEQ ID NO: 1252 - DNA, 22 bp, synthetic construct
  misc_feature 1..22: note = Synthetic
  source 1..22: mol_type = other DNA
atctgcaaagagtgtccaatca

SEQ ID NO: 1253 - DNA, 22 bp, synthetic construct
  misc_feature 1..22: note = Synthetic
  source 1..22: mol_type = other DNA
caggccaaatgtaacatctgca

SEQ ID NO: 1254 - DNA, 22 bp, synthetic construct
  misc_feature 1..22: note = Synthetic
  source 1..22: mol_type = other DNA
tggtgtggctgcccgtcctgca

SEQ ID NO: 1255 - DNA, 22 bp, synthetic construct
  misc_feature 1..22: note = Synthetic
  source 1..22: mol_type = other DNA
tcgaagcggccctcttcctaga

SEQ ID NO: 1256 - DNA, 22 bp, synthetic construct
  misc_feature 1..22: note = Synthetic
  source 1..22: mol_type = other DNA
accggagtgcaatattccacca

SEQ ID NO: 1257 - DNA, 22 bp, synthetic construct
  misc_feature 1..22: note = Synthetic
  source 1..22: mol_type = other DNA
cataaaatgcactatcccatgg

SEQ ID NO: 1258 - DNA, 22 bp, synthetic construct
  misc_feature 1..22: note = Synthetic
  source 1..22: mol_type = other DNA
gccaaagctgctttttttctgg

SEQ ID NO: 1259 - DNA, 22 bp, synthetic construct
  misc_feature 1..22: note = Synthetic
  source 1..22: mol_type = other DNA
gtttttgctctttatcaggtac

SEQ ID NO: 1260 - DNA, 22 bp, synthetic construct
  misc_feature 1..22: note = Synthetic
  source 1..22: mol_type = other DNA
tgcactggcaggtagcccattc

SEQ ID NO: 1261 - DNA, 22 bp, synthetic construct
  misc_feature 1..22: note = Synthetic
  source 1..22: mol_type = other DNA
tagagggggacaacatggaaac

SEQ ID NO: 1262 - DNA, 22 bp, synthetic construct
  misc_feature 1..22: note = Synthetic
  source 1..22: mol_type = other DNA
aaaggtattttgcgaagcatcc

SEQ ID NO: 1263 - DNA, 22 bp, synthetic construct
  misc_feature 1..22: note = Synthetic
  source 1..22: mol_type = other DNA
aatctactggccagaagttgat

SEQ ID NO: 1264 - DNA, 22 bp, synthetic construct
  misc_feature 1..22: note = Synthetic
  source 1..22: mol_type = other DNA
acttctggccagtagattctgc

SEQ ID NO: 1265 - DNA, 22 bp, synthetic construct
  misc_feature 1..22: note = Synthetic
  source 1..22: mol_type = other DNA
ctgctagcataatgttcaatgc

SEQ ID NO: 1266 - DNA, 22 bp, synthetic construct
  misc_feature 1..22: note = Synthetic
  source 1..22: mol_type = other DNA
tagcataatgttcaatgcgtga

SEQ ID NO: 1267 - DNA, 22 bp, synthetic construct
  misc_feature 1..22: note = Synthetic
  source 1..22: mol_type = other DNA
ctagcagaaatggaaaacagca

SEQ ID NO: 1268 - DNA, 22 bp, synthetic construct
  misc_feature 1..22: note = Synthetic
  source 1..22: mol_type = other DNA
tgttttcttcctcaagatctgc

SEQ ID NO: 1269 - DNA, 22 bp, synthetic construct
  misc_feature 1..22: note = Synthetic
  source 1..22: mol_type = other DNA
ggactacgaggctggctcaggg

SEQ ID NO: 1270 - DNA, 22 bp, synthetic construct
  misc_feature 1..22: note = Synthetic
  source 1..22: mol_type = other DNA
ggttcaaactttggcagtaatg

SEQ ID NO: 1271 - DNA, 22 bp, synthetic construct
  misc_feature 1..22: note = Synthetic
  source 1..22: mol_type = other DNA
cagatcttgaggaagaaaacag

SEQ ID NO: 1272 - DNA, 22 bp, synthetic construct
  misc_feature 1..22: note = Synthetic
  source 1..22: mol_type = other DNA
gtgaggaaagaggggagctaga

SEQ ID NO: 1273 - DNA, 22 bp, synthetic construct
  misc_feature 1..22: note = Synthetic
  source 1..22: mol_type = other DNA
tgcccagatcttgatttcctta

SEQ ID NO: 1274 - DNA, 22 bp, synthetic construct
  misc_feature 1..22: note = Synthetic
  source 1..22: mol_type = other DNA
ccagctgtttattgtggtcttc

SEQ ID NO: 1275 - DNA, 22 bp, synthetic construct
  misc_feature 1..22: note = Synthetic
  source 1..22: mol_type = other DNA
ctggaagaccacaataaacagc

SEQ ID NO: 1276 - DNA, 22 bp, synthetic construct
  misc_feature 1..22: note = Synthetic
  source 1..22: mol_type = other DNA
aacacaaaggccgcctggaagc

SEQ ID NO: 1277 - DNA, 22 bp, synthetic construct
  misc_feature 1..22: note = Synthetic
  source 1..22: mol_type = other DNA
gcccacctctccccagagtccc

SEQ ID NO: 1278 - DNA, 22 bp, synthetic construct
  misc_feature 1..22: note = Synthetic
  source 1..22: mol_type = other DNA
tgaaatgatgcccacctctccc

SEQ ID NO: 1279 - DNA, 22 bp, synthetic construct
  misc_feature 1..22: note = Synthetic
  source 1..22: mol_type = other DNA
gatgccaataggaatctgcaag

SEQ ID NO: 1280 - DNA, 22 bp, synthetic construct
  misc_feature 1..22: note = Synthetic
  source 1..22: mol_type = other DNA
gagtagctaggacacttaccca

SEQ ID NO: 1281 - DNA, 22 bp, synthetic construct
  misc_feature 1..22: note = Synthetic
  source 1..22: mol_type = other DNA
tggcagtcaaacttcggactcc

SEQ ID NO: 1282 - DNA, 22 bp, synthetic construct
  misc_feature 1..22: note = Synthetic
  source 1..22: mol_type = other DNA
acagcagtcagcctatgctgct

SEQ ID NO: 1283 - DNA, 22 bp, synthetic construct
  misc_feature 1..22: note = Synthetic
  source 1..22: mol_type = other DNA
ttagccccaggcagaggccaaa

SEQ ID NO: 1284 - DNA, 22 bp, synthetic construct
  misc_feature 1..22: note = Synthetic
  source 1..22: mol_type = other DNA
agcttacctcttgaactaggga

SEQ ID NO: 1285 - DNA, 22 bp, synthetic construct
  misc_feature 1..22: note = Synthetic
  source 1..22: mol_type = other DNA
tcttgaactagggaaggagttg

SEQ ID NO: 1286 - DNA, 22 bp, synthetic construct
  misc_feature 1..22: note = Synthetic
  source 1..22: mol_type = other DNA
agtcctccccaggacacaagca

SEQ ID NO: 1287 - DNA, 22 bp, synthetic construct
  misc_feature 1..22: note = Synthetic
  source 1..22: mol_type = other DNA
taacctctctcattggctttcc

SEQ ID NO: 1288 - DNA, 22 bp, synthetic construct
  misc_feature 1..22: note = Synthetic
  source 1..22: mol_type = other DNA
gcactctatttacctctgattt

SEQ ID NO: 1289 - DNA, 22 bp, synthetic construct
  misc_feature 1..22: note = Synthetic
  source 1..22: mol_type = other DNA
cttacttacttaaacttcttag

SEQ ID NO: 1290 - DNA, 22 bp, synthetic construct
  misc_feature 1..22: note = Synthetic
  source 1..22: mol_type = other DNA
aaagtaaccccttgttttaaat

SEQ ID NO: 1291 - DNA, 22 bp, synthetic construct
  misc_feature 1..22: note = Synthetic
  source 1..22: mol_type = other DNA
taaatctgagttttaaaaatcc

SEQ ID NO: 1292 - DNA, 22 bp, synthetic construct
  misc_feature 1..22: note = Synthetic
  source 1..22: mol_type = other DNA
ggtaatttgttaccttagagct

SEQ ID NO: 1293 - DNA, 22 bp, synthetic construct
  misc_feature 1..22: note = Synthetic
  source 1..22: mol_type = other DNA
tgaaaattatgaaggaaaaaga

SEQ ID NO: 1294 - DNA, 22 bp, synthetic construct
  misc_feature 1..22: note = Synthetic
  source 1..22: mol_type = other DNA
ataggtcacacggtggtatcta

SEQ ID NO: 1295 - DNA, 22 bp, synthetic construct
  misc_feature 1..22: note = Synthetic
  source 1..22: mol_type = other DNA
gtcacacggtggtatctattga

SEQ ID NO: 1296 - DNA, 22 bp, synthetic construct
  misc_feature 1..22: note = Synthetic
  source 1..22: mol_type = other DNA
aaaaagaaataaaatggcatga

SEQ ID NO: 1297 - DNA, 22 bp, synthetic construct
  misc_feature 1..22: note = Synthetic
  source 1..22: mol_type = other DNA
ttaacctgtctaatccaccaag

SEQ ID NO: 1298 - DNA, 22 bp, synthetic construct
  misc_feature 1..22: note = Synthetic
  source 1..22: mol_type = other DNA
aagaagggtttttttgtaacat

SEQ ID NO: 1299 - DNA, 22 bp, synthetic construct
  misc_feature 1..22: note = Synthetic
  source 1..22: mol_type = other DNA
gaactactcgcagagaaatgca

SEQ ID NO: 1300 - DNA, 22 bp, synthetic construct
  misc_feature 1..22: note = Synthetic
  source 1..22: mol_type = other DNA
tggaaacacagttcatgggctt

SEQ ID NO: 1301 - DNA, 22 bp, synthetic construct
  misc_feature 1..22: note = Synthetic
  source 1..22: mol_type = other DNA
caatcatccaatccttcactta

SEQ ID NO: 1302 - DNA, 22 bp, synthetic construct
  misc_feature 1..22: note = Synthetic
  source 1..22: mol_type = other DNA
aaagagtggcctactccttcac

SEQ ID NO: 1303 - DNA, 22 bp, synthetic construct
  misc_feature 1..22: note = Synthetic
  source 1..22: mol_type = other DNA
tactccttcacagggatgggct

SEQ ID NO: 1304 - DNA, 22 bp, synthetic construct
  misc_feature 1..22: note = Synthetic
  source 1..22: mol_type = other DNA
tatcatcgtcctgctactgctt

SEQ ID NO: 1305 - DNA, 22 bp, synthetic construct
  misc_feature 1..22: note = Synthetic
  source 1..22: mol_type = other DNA
taccttctgatgttcacaaggt

SEQ ID NO: 1306 - DNA, 22 bp, synthetic construct
  misc_feature 1..22: note = Synthetic
  source 1..22: mol_type = other DNA
tggcattgctagcagcaggaag

SEQ ID NO: 1307 - DNA, 22 bp, synthetic construct
  misc_feature 1..22: note = Synthetic
  source 1..22: mol_type = other DNA
attctagaccaagcaggtaagc

SEQ ID NO: 1308 - DNA, 22 bp, synthetic construct
  misc_feature 1..22: note = Synthetic
  source 1..22: mol_type = other DNA
actagaagtaatttctttctat

SEQ ID NO: 1309 - DNA, 22 bp, synthetic construct
  misc_feature 1..22: note = Synthetic
  source 1..22: mol_type = other DNA
atatgcaaaaaaagaaaaagcc

SEQ ID NO: 1310 - DNA, 22 bp, synthetic construct
  misc_feature 1..22: note = Synthetic
  source 1..22: mol_type = other DNA
aagaaaaagccatgaatttcat

SEQ ID NO: 1311 - DNA, 22 bp, synthetic construct
  misc_feature 1..22: note = Synthetic
  source 1..22: mol_type = other DNA
tttcatatggatatcacgccaa

SEQ ID NO: 1312 - DNA, 22 bp, synthetic construct
  misc_feature 1..22: note = Synthetic
  source 1..22: mol_type = other DNA
tgtgtgtgtttgttttgttttt

SEQ ID NO: 1313 - DNA, 22 bp, synthetic construct
  misc_feature 1..22: note = Synthetic
  source 1..22: mol_type = other DNA
actgtctaatcctctttgttgt

SEQ ID NO: 1314 - DNA, 22 bp, synthetic construct
  misc_feature 1..22: note = Synthetic
  source 1..22: mol_type = other DNA
atgaatattataaaaaccatgc

SEQ ID NO: 1315 - DNA, 22 bp, synthetic construct
  misc_feature 1..22: note = Synthetic
  source 1..22: mol_type = other DNA
ttataaaaaccatgcgggaatc

SEQ ID NO: 1316 - DNA, 22 bp, synthetic construct
  misc_feature 1..22: note = Synthetic
  source 1..22: mol_type = other DNA
taacaccaacactgtaacattt

SEQ ID NO: 1317 - DNA, 22 bp, synthetic construct
  misc_feature 1..22: note = Synthetic
  source 1..22: mol_type = other DNA
ttttcaggtactgagttcttac

SEQ ID NO: 1318 - DNA, 22 bp, synthetic construct
  misc_feature 1..22: note = Synthetic
  source 1..22: mol_type = other DNA
gttttgtcattgttttcaggta

SEQ ID NO: 1319 - DNA, 22 bp, synthetic construct
  misc_feature 1..22: note = Synthetic
  source 1..22: mol_type = other DNA
ttttagacacattagctctgga

SEQ ID NO: 1320 - DNA, 22 bp, synthetic construct
  misc_feature 1..22: note = Synthetic
  source 1..22: mol_type = other DNA
tttcttttagacacattagctc

SEQ ID NO: 1321 - DNA, 22 bp, synthetic construct
  misc_feature 1..22: note = Synthetic
  source 1..22: mol_type = other DNA
tcattctaaaatcagaggtaaa

SEQ ID NO: 1322 - DNA, 22 bp, synthetic construct
  misc_feature 1..22: note = Synthetic
  source 1..22: mol_type = other DNA
tttaaaactcagatttaaaaca

SEQ ID NO: 1323 - DNA, 22 bp, synthetic construct
  misc_feature 1..22: note = Synthetic
  source 1..22: mol_type = other DNA
acgctggaccttttctttaccc

SEQ ID NO: 1324 - DNA, 22 bp, synthetic construct
  misc_feature 1..22: note = Synthetic
  source 1..22: mol_type = other DNA
tgttcctgataattgtgcacac

SEQ ID NO: 1325 - DNA, 22 bp, synthetic construct
  misc_feature 1..22: note = Synthetic
  source 1..22: mol_type = other DNA
tatttctacctcactttggttt

SEQ ID NO: 1326 - DNA, 22 bp, synthetic construct
  misc_feature 1..22: note = Synthetic
  source 1..22: mol_type = other DNA
aagtgtaattagcttttggaga

SEQ ID NO: 1327 - DNA, 22 bp, synthetic construct
  misc_feature 1..22: note = Synthetic
  source 1..22: mol_type = other DNA
catcaagtgtaattagcttttg

SEQ ID NO: 1328 - DNA, 22 bp, synthetic construct
  misc_feature 1..22: note = Synthetic
  source 1..22: mol_type = other DNA
catcaagtgtaattagcttttg

SEQ ID NO: 1329 - DNA, 22 bp, synthetic construct
  misc_feature 1..22: note = Synthetic
  source 1..22: mol_type = other DNA
tgttacaaaaaaacccttcttg

SEQ ID NO: 1330 - DNA, 22 bp, synthetic construct
  misc_feature 1..22: note = Synthetic
  source 1..22: mol_type = other DNA
tttccatcctttgcatttctct

SEQ ID NO: 1331 - DNA, 22 bp, synthetic construct
  misc_feature 1..22: note = Synthetic
  source 1..22: mol_type = other DNA
tagatttattgtcccatgtggg

SEQ ID NO: 1332 - DNA, 22 bp, synthetic construct
  misc_feature 1..22: note = Synthetic
  source 1..22: mol_type = other DNA
tttttagatttattgtcccatg

SEQ ID NO: 1333 - DNA, 22 bp, synthetic construct
  misc_feature 1..22: note = Synthetic
  source 1..22: mol_type = other DNA
ctcttctcacagtcaaaaggaa

SEQ ID NO: 1334 - DNA, 22 bp, synthetic construct
  misc_feature 1..22: note = Synthetic
  source 1..22: mol_type = other DNA
aggccactctttaagtgaagga

SEQ ID NO: 1335 - DNA, 22 bp, synthetic construct
  misc_feature 1..22: note = Synthetic
  source 1..22: mol_type = other DNA
ggagtaggccactctttaagtg

SEQ ID NO: 1336 - DNA, 22 bp, synthetic construct
  misc_feature 1..22: note = Synthetic
  source 1..22: mol_type = other DNA
gattcccagcccatccctgtga

SEQ ID NO: 1337 - DNA, 22 bp, synthetic construct
  misc_feature 1..22: note = Synthetic
  source 1..22: mol_type = other DNA
acgatgatagggctggagggct

SEQ ID NO: 1338 - DNA, 22 bp, synthetic construct
  misc_feature 1..22: note = Synthetic
  source 1..22: mol_type = other DNA
acacaggacttattatatcaga

SEQ ID NO: 1339 - DNA, 22 bp, synthetic construct
  misc_feature 1..22: note = Synthetic
  source 1..22: mol_type = other DNA
gaatacacaggacttattatat

SEQ ID NO: 1340 - DNA, 22 bp, synthetic construct
  misc_feature 1..22: note = Synthetic
  source 1..22: mol_type = other DNA
tttttttaaagggaacatgtga

SEQ ID NO: 1341 - DNA, 22 bp, synthetic construct
  misc_feature 1..22: note = Synthetic
  source 1..22: mol_type = other DNA
tggatttttttaaagggaacat

SEQ ID NO: 1342 - DNA, 22 bp, synthetic construct
  misc_feature 1..22: note = Synthetic
  source 1..22: mol_type = other DNA
acaacgaaagtaaagtaaagta

SEQ ID NO: 1343 - DNA, 22 bp, synthetic construct
  misc_feature 1..22: note = Synthetic
  source 1..22: mol_type = other DNA
aggcttacctgcttggtctaga

SEQ ID NO: 1344 - DNA, 22 bp, synthetic construct
  misc_feature 1..22: note = Synthetic
  source 1..22: mol_type = other DNA
atccaggcttacctgcttggtc

SEQ ID NO: 1345 - DNA, 22 bp, synthetic construct
  misc_feature 1..22: note = Synthetic
  source 1..22: mol_type = other DNA
atagttatatagataaagagat

SEQ ID NO: 1346 - DNA, 22 bp, synthetic construct
  misc_feature 1..22: note = Synthetic
  source 1..22: mol_type = other DNA
ctgtcagctgagtggggcaggc

SEQ ID NO: 1347 - DNA, 22 bp, synthetic construct
  misc_feature 1..22: note = Synthetic
  source 1..22: mol_type = other DNA
ctgctcatttgagaactgtcag

SEQ ID NO: 1348 - DNA, 22 bp, synthetic construct
  misc_feature 1..22: note = Synthetic
  source 1..22: mol_type = other DNA
atttctttatatggaacgcatt

SEQ ID NO: 1349 - DNA, 22 bp, synthetic construct
  misc_feature 1..22: note = Synthetic
  source 1..22: mol_type = other DNA
gaaataaatctatatttttgtg

SEQ ID NO: 1350 - DNA, 22 bp, synthetic construct
  misc_feature 1..22: note = Synthetic
  source 1..22: mol_type = other DNA
acaacaaagaggattagacagt

SEQ ID NO: 1351 - DNA, 22 bp, synthetic construct
  misc_feature 1..22: note = Synthetic
  source 1..22: mol_type = other DNA
tttataatattcatacaacaaa

SEQ ID NO: 1352 - DNA, 22 bp, synthetic construct
  misc_feature 1..22: note = Synthetic
  source 1..22: mol_type = other DNA
gtcatgacagatgaagaaggag

SEQ ID NO: 1353 - DNA, 22 bp, synthetic construct
  misc_feature 1..22: note = Synthetic
  source 1..22: mol_type = other DNA
gcagatgatttgggcagagcga

SEQ ID NO: 1354 - DNA, 22 bp, synthetic construct
  misc_feature 1..22: note = Synthetic
  source 1..22: mol_type = other DNA
ttcttcccaccaaagcattttg

SEQ ID NO: 1355 - DNA, 22 bp, synthetic construct
  misc_feature 1..22: note = Synthetic
  source 1..22: mol_type = other DNA
tttgaaaagtgtatatcaaggc

SEQ ID NO: 1356 - DNA, 22 bp, synthetic construct
  misc_feature 1..22: note = Synthetic
  source 1..22: mol_type = other DNA
atcaaggcagcgataaaaaaaa

SEQ ID NO: 1357 - DNA, 22 bp, synthetic construct
  misc_feature 1..22: note = Synthetic
  source 1..22: mol_type = other DNA
gcagcgataaaaaaaacctggt

SEQ ID NO: 1358 - DNA, 22 bp, synthetic construct
  misc_feature 1..22: note = Synthetic
  source 1..22: mol_type = other DNA
aaagttcttcaaactttattgc

SEQ ID NO: 1359 - DNA, 22 bp, synthetic construct
  misc_feature 1..22: note = Synthetic
  source 1..22: mol_type = other DNA
ttattgctccagtaggcttaaa

SEQ ID NO: 1360 - DNA, 22 bp, synthetic construct
  misc_feature 1..22: note = Synthetic
  source 1..22: mol_type = other DNA
aacaaacttcagcagctttaaa

SEQ ID NO: 1361 - DNA, 22 bp, synthetic construct
  misc_feature 1..22: note = Synthetic
  source 1..22: mol_type = other DNA
gcagctttaaaaaaagtaacac

SEQ ID NO: 1362 - DNA, 22 bp, synthetic construct
  misc_feature 1..22: note = Synthetic
  source 1..22: mol_type = other DNA
tttttcctattcgtttttctcc

SEQ ID NO: 1363 - DNA, 22 bp, synthetic construct
  misc_feature 1..22: note = Synthetic
  source 1..22: mol_type = other DNA
ttcctattcgtttttctccgaa

SEQ ID NO: 1364 - DNA, 22 bp, synthetic construct
  misc_feature 1..22: note = Synthetic
  source 1..22: mol_type = other DNA
tttctccgaaggtaattgcctc

SEQ ID NO: 1365 - DNA, 22 bp, synthetic construct
  misc_feature 1..22: note = Synthetic
  source 1..22: mol_type = other DNA
cgaaggtaattgcctcccagat

SEQ ID NO: 1366 - DNA, 22 bp, synthetic construct
  misc_feature 1..22: note = Synthetic
  source 1..22: mol_type = other DNA
ccagatctgagtcctgtagggg

SEQ ID NO: 1367 - DNA, 22 bp, synthetic construct
  misc_feature 1..22: note = Synthetic
  source 1..22: mol_type = other DNA
atctgagtcctgtagggggaaa

SEQ ID NO: 1368 - DNA, 22 bp, synthetic construct
  misc_feature 1..22: note = Synthetic
  source 1..22: mol_type = other DNA
tgagtcctgtagggggaaagtg

SEQ ID NO: 1369 - DNA, 22 bp, synthetic construct
  misc_feature 1..22: note = Synthetic
  source 1..22: mol_type = other DNA
tgggaagaagtagaggactgtt

SEQ ID NO: 1370 - DNA, 22 bp, synthetic construct
  misc_feature 1..22: note = Synthetic
  source 1..22: mol_type = other DNA
ttttcaaaatgctttggtggga

SEQ ID NO: 1371 - DNA, 22 bp, synthetic construct
  misc_feature 1..22: note = Synthetic
  source 1..22: mol_type = other DNA
tgatatacacttttcaaaatgc

SEQ ID NO: 1372 - DNA, 22 bp, synthetic construct
  misc_feature 1..22: note = Synthetic
  source 1..22: mol_type = other DNA
cgctgccttgatatacactttt

SEQ ID NO: 1373 - DNA, 22 bp, synthetic construct
  misc_feature 1..22: note = Synthetic
  source 1..22: mol_type = other DNA
accaggttttttttatcgctgc

SEQ ID NO: 1374 - DNA, 22 bp, synthetic construct
  misc_feature 1..22: note = Synthetic
  source 1..22: mol_type = other DNA
aataaagtttgaagaactttta

SEQ ID NO: 1375 - DNA, 22 bp, synthetic construct
  misc_feature 1..22: note = Synthetic
  source 1..22: mol_type = other DNA
gtttttaagcctactggagcaa

SEQ ID NO: 1376 - DNA, 22 bp, synthetic construct
  misc_feature 1..22: note = Synthetic
  source 1..22: mol_type = other DNA
tcattgtttttaagcctactgg

SEQ ID NO: 1377 - DNA, 22 bp, synthetic construct
  misc_feature 1..22: note = Synthetic
  source 1..22: mol_type = other DNA
ttttttaaagctgctgaagttt

SEQ ID NO: 1378 - DNA, 22 bp, synthetic construct
  misc_feature 1..22: note = Synthetic
  source 1..22: mol_type = other DNA
gtgttactttttttaaagctgc

SEQ ID NO: 1379 - DNA, 22 bp, synthetic construct
  misc_feature 1..22: note = Synthetic
  source 1..22: mol_type = other DNA
gagaaaaacgaataggaaaaac

SEQ ID NO: 1380 - DNA, 22 bp, synthetic construct
  misc_feature 1..22: note = Synthetic
  source 1..22: mol_type = other DNA
aggcaattaccttcggagaaaa

SEQ ID NO: 1381 - DNA, 22 bp, synthetic construct
  misc_feature 1..22: note = Synthetic
  source 1..22: mol_type = other DNA
cctacaggactcagatctggga

SEQ ID NO: 1382 - DNA, 22 bp, synthetic construct
  misc_feature 1..22: note = Synthetic
  source 1..22: mol_type = other DNA
actcactttccccctacaggac

SEQ ID NO: 1383 - DNA, 22 bp, synthetic construct
  misc_feature 1..22: note = Synthetic
  source 1..22: mol_type = other DNA
gtaacaaaccattcttacctta

SEQ ID NO: 1384 - DNA, 22 bp, synthetic construct
  misc_feature 1..22: note = Synthetic
  source 1..22: mol_type = other DNA
aaattgtgcatttacccatttt

SEQ ID NO: 1385 - DNA, 22 bp, synthetic construct
  misc_feature 1..22: note = Synthetic
  source 1..22: mol_type = other DNA
tttgaacatcttctctttcatc

SEQ ID NO: 1386 - DNA, 22 bp, synthetic construct
  misc_feature 1..22: note = Synthetic
  source 1..22: mol_type = other DNA
taaatgcacaattttctaaggt

SEQ ID NO: 1387 - DNA, 22 bp, synthetic construct
  misc_feature 1..22: note = Synthetic
  source 1..22: mol_type = other DNA
aatgggtaaatgcacaattttc

SEQ ID NO: 1388 - DNA, 22 bp, synthetic construct
  misc_feature 1..22: note = Synthetic
  source 1..22: mol_type = other DNA
acattcacaaaatgggtaaatg

SEQ ID NO: 1389 - DNA, 22 bp, synthetic construct
  misc_feature 1..22: note = Synthetic
  source 1..22: mol_type = other DNA
aaagaaaacattcacaaaatgg

SEQ ID NO: 1390 - DNA, 22 bp, synthetic construct
  misc_feature 1..22: note = Synthetic
  source 1..22: mol_type = other DNA
ttcaaaagaaaacattcacaaa

SEQ ID NO: 1391 - DNA, 22 bp, synthetic construct
  misc_feature 1..22: note = Synthetic
  source 1..22: mol_type = other DNA
gatgttcaaaagaaaacattca

SEQ ID NO: 1392 - DNA, 22 bp, synthetic construct
  misc_feature 1..22: note = Synthetic
  source 1..22: mol_type = other DNA
attttgcattttagatgaaaga

SEQ ID NO: 1393 - DNA, 22 bp, synthetic construct
  misc_feature 1..22: note = Synthetic
  source 1..22: mol_type = other DNA
ttttgccctgtcaggccttcga

SEQ ID NO: 1394 - DNA, 22 bp, synthetic construct
  misc_feature 1..22: note = Synthetic
  source 1..22: mol_type = other DNA
tctaggaggcgcctcccatcct

SEQ ID NO: 1395 - DNA, 22 bp, synthetic construct
  misc_feature 1..22: note = Synthetic
  source 1..22: mol_type = other DNA
ctcccatcctgtaggtcactga

SEQ ID NO: 1396 - DNA, 22 bp, synthetic construct
  misc_feature 1..22: note = Synthetic
  source 1..22: mol_type = other DNA
cctgtaggtcactgaagaggtt

SEQ ID NO: 1397 - DNA, 22 bp, synthetic construct
  misc_feature 1..22: note = Synthetic
  source 1..22: mol_type = other DNA
ctcaatatgctgcttcccaaac

SEQ ID NO: 1398 - DNA, 22 bp, synthetic construct
  misc_feature 1..22: note = Synthetic
  source 1..22: mol_type = other DNA
tcgaaggcctgacagggcaaaa

SEQ ID NO: 1399 - DNA, 22 bp, synthetic construct
  misc_feature 1..22: note = Synthetic
  source 1..22: mol_type = other DNA
tgagaacctcttcagtgaccta

SEQ ID NO: 1400 - DNA, 22 bp, synthetic construct
  misc_feature 1..22: note = Synthetic
  source 1..22: mol_type = other DNA
gaagcagcatattgagaacctc

SEQ ID NO: 1401 - DNA, 22 bp, synthetic construct
  misc_feature 1..22: note = Synthetic
  source 1..22: mol_type = other DNA
tacattattgttctgcaaaacc

SEQ ID NO: 1402 - DNA, 22 bp, synthetic construct
  misc_feature 1..22: note = Synthetic
  source 1..22: mol_type = other DNA
attgttcagggcatgaactctt

SEQ ID NO: 1403 - DNA, 22 bp, synthetic construct
  misc_feature 1..22: note = Synthetic
  source 1..22: mol_type = other DNA
ggttttgcagaacaataatgta

SEQ ID NO: 1404 - DNA, 22 bp, synthetic construct
  misc_feature 1..22: note = Synthetic
  source 1..22: mol_type = other DNA
gcgggttttgcagaacaataat

SEQ ID NO: 1405 - DNA, 22 bp, synthetic construct
  misc_feature 1..22: note = Synthetic
  source 1..22: mol_type = other DNA
ggcactgcgggttttgcagaac

SEQ ID NO: 1406 - DNA, 22 bp, synthetic construct
  misc_feature 1..22: note = Synthetic
  source 1..22: mol_type = other DNA
caaggcactgcgggttttgcag

SEQ ID NO: 1407 - DNA, 22 bp, synthetic construct
  misc_feature 1..22: note = Synthetic
  source 1..22: mol_type = other DNA
tgaacaatgtcaacaaggcact

SEQ ID NO: 1408 - DNA, 22 bp, synthetic construct
  misc_feature 1..22: note = Synthetic
  source 1..22: mol_type = other DNA
atccacaagagttcatgccctg

SEQ ID NO: 1409 - DNA, 22 bp, synthetic construct
  misc_feature 1..22: note = Synthetic
  source 1..22: mol_type = other DNA
agccaaaagaaaaaggatccac

SEQ ID NO: 1410 - DNA, 22 bp, synthetic construct
  misc_feature 1..22: note = Synthetic
  source 1..22: mol_type = other DNA
ttttgttctcagccaaaagaaa

SEQ ID NO: 1411 - DNA, 22 bp, synthetic construct
  misc_feature 1..22: note = Synthetic
  source 1..22: mol_type = other DNA
tcaggattcttacctgccagtg

SEQ ID NO: 1412 - DNA, 22 bp, synthetic construct
  misc_feature 1..22: note = Synthetic
  source 1..22: mol_type = other DNA
cctgccagtggaggattatatt

SEQ ID NO: 1413 - DNA, 22 bp, synthetic construct
  misc_feature 1..22: note = Synthetic
  source 1..22: mol_type = other DNA
ggattatattccaaatcaaacc

SEQ ID NO: 1414 - DNA, 22 bp, synthetic construct
  misc_feature 1..22: note = Synthetic
  source 1..22: mol_type = other DNA
tatattccaaatcaaaccaaga

SEQ ID NO: 1415 - DNA, 22 bp, synthetic construct
  misc_feature 1..22: note = Synthetic
  source 1..22: mol_type = other DNA
caaatcaaaccaagagtcagtt

SEQ ID NO: 1416 - DNA, 22 bp, synthetic construct
  misc_feature 1..22: note = Synthetic
  source 1..22: mol_type = other DNA
gagtcagtttatgatttccatc

SEQ ID NO: 1417 - DNA, 22 bp, synthetic construct
  misc_feature 1..22: note = Synthetic
  source 1..22: mol_type = other DNA
gtttatgatttccatctacgat

SEQ ID NO: 1418 - DNA, 22 bp, synthetic construct
  misc_feature 1..22: note = Synthetic
  source 1..22: mol_type = other DNA
ttccatctacgatgtcagtact

SEQ ID NO: 1419 - DNA, 22 bp, synthetic construct
  misc_feature 1..22: note = Synthetic
  source 1..22: mol_type = other DNA
atgtcagtacttccaatattca

SEQ ID NO: 1420 - DNA, 22 bp, synthetic construct
  misc_feature 1..22: note = Synthetic
  source 1..22: mol_type = other DNA
atataatcctccactggcaggt

SEQ ID NO: 1421 - DNA, 22 bp, synthetic construct
  misc_feature 1..22: note = Synthetic
  source 1..22: mol_type = other DNA
tttggaatataatcctccactg

SEQ ID NO: 1422 - DNA, 22 bp, synthetic construct
  misc_feature 1..22: note = Synthetic
  source 1..22: mol_type = other DNA
tgactcttggtttgatttggaa

SEQ ID NO: 1423 - DNA, 22 bp, synthetic construct
  misc_feature 1..22: note = Synthetic
  source 1..22: mol_type = other DNA
taaactgactcttggtttgatt

SEQ ID NO: 1424 - DNA, 22 bp, synthetic construct
  misc_feature 1..22: note = Synthetic
  source 1..22: mol_type = other DNA
gaaatcataaactgactcttgg

SEQ ID NO: 1425 - DNA, 22 bp, synthetic construct
  misc_feature 1..22: note = Synthetic
  source 1..22: mol_type = other DNA
agatggaaatcataaactgact

SEQ ID NO: 1426 - DNA, 22 bp, synthetic construct
  misc_feature 1..22: note = Synthetic
  source 1..22: mol_type = other DNA
tggaagtactgacatcgtagat

SEQ ID NO: 1427 - DNA, 22 bp, synthetic construct
  misc_feature 1..22: note = Synthetic
  source 1..22: mol_type = other DNA
gaatattggaagtactgacatc

SEQ ID NO: 1428 - DNA, 22 bp, synthetic construct
  misc_feature 1..22: note = Synthetic
  source 1..22: mol_type = other DNA
acaggttgatttagtgaatatt

SEQ ID NO: 1429 - DNA, 22 bp, synthetic construct
  misc_feature 1..22: note = Synthetic
  source 1..22: mol_type = other DNA
ctttctttaacaggttgattta

SEQ ID NO: 1430 - DNA, 22 bp, synthetic construct
  misc_feature 1..22: note = Synthetic
  source 1..22: mol_type = other DNA
acccctttctttaacaggttga

SEQ ID NO: 1431 - DNA, 22 bp, synthetic construct
  misc_feature 1..22: note = Synthetic
  source 1..22: mol_type = other DNA
agtaatcttcttacctatgact

SEQ ID NO: 1432 - DNA, 22 bp, synthetic construct
  misc_feature 1..22: note = Synthetic
  source 1..22: mol_type = other DNA
tcaaagccaggccatcagacca

SEQ ID NO: 1433 - DNA, 22 bp, synthetic construct
  misc_feature 1..22: note = Synthetic
  source 1..22: mol_type = other DNA
aagccaggccatcagaccagct

SEQ ID NO: 1434 - DNA, 22 bp, synthetic construct
  misc_feature 1..22: note = Synthetic
  source 1..22: mol_type = other DNA
aggccatcagaccagctggtgg

SEQ ID NO: 1435 - DNA, 22 bp, synthetic construct
  misc_feature 1..22: note = Synthetic
  source 1..22: mol_type = other DNA
catcagaccagctggtggtgaa

SEQ ID NO: 1436 - DNA, 22 bp, synthetic construct
  misc_feature 1..22: note = Synthetic
  source 1..22: mol_type = other DNA
gtgaagttgattacattaacct

SEQ ID NO: 1437 - DNA, 22 bp, synthetic construct
  misc_feature 1..22: note = Synthetic
  source 1..22: mol_type = other DNA
aagttgattacattaacctgtg

SEQ ID NO: 1438 - DNA, 22 bp, synthetic construct
  misc_feature 1..22: note = Synthetic
  source 1..22: mol_type = other DNA
ttacattaacctgtggataatt

SEQ ID NO: 1439 - DNA, 22 bp, synthetic construct
  misc_feature 1..22: note = Synthetic
  source 1..22: mol_type = other DNA
attaacctgtggataattacga

SEQ ID NO: 1440 - DNA, 22 bp, synthetic construct
  misc_feature 1..22: note = Synthetic
  source 1..22: mol_type = other DNA
ttgattgtcggacccagctcag

SEQ ID NO: 1441 - DNA, 22 bp, synthetic construct
  misc_feature 1..22: note = Synthetic
  source 1..22: mol_type = other DNA
agctcaggagaatcttttcact

SEQ ID NO: 1442 - DNA, 22 bp, synthetic construct
  misc_feature 1..22: note = Synthetic
  source 1..22: mol_type = other DNA
aatcttttcactgttggtttgt

SEQ ID NO: 1443 - DNA, 22 bp, synthetic construct
  misc_feature 1..22: note = Synthetic
  source 1..22: mol_type = other DNA
tgttggtttgttgcaatccagc

SEQ ID NO: 1444 - DNA, 22 bp, synthetic construct
  misc_feature 1..22: note = Synthetic
  source 1..22: mol_type = other DNA
ttgaatgctctcatccatagtc

SEQ ID NO: 1445 - DNA, 22 bp, synthetic construct
  misc_feature 1..22: note = Synthetic
  source 1..22: mol_type = other DNA
cctggctttgaatgctctcatc

SEQ ID NO: 1446 - DNA, 22 bp, synthetic construct
  misc_feature 1..22: note = Synthetic
  source 1..22: mol_type = other DNA
cagctggtctgatggcctggct

SEQ ID NO: 1447 - DNA, 22 bp, synthetic construct
  misc_feature 1..22: note = Synthetic
  source 1..22: mol_type = other DNA
aatcaacttcaccaccagctgg

SEQ ID NO: 1448 - DNA, 22 bp, synthetic construct
  misc_feature 1..22: note = Synthetic
  source 1..22: mol_type = other DNA
aatgtaatcaacttcaccacca

SEQ ID NO: 1449 - DNA, 22 bp, synthetic construct
  misc_feature 1..22: note = Synthetic
  source 1..22: mol_type = other DNA
ctcgtaattatccacaggttaa

SEQ ID NO: 1450 - DNA, 22 bp, synthetic construct
  misc_feature 1..22: note = Synthetic
  source 1..22: mol_type = other DNA
atcaactcgtaattatccacag

SEQ ID NO: 1451 - DNA, 22 bp, synthetic construct
  misc_feature 1..22: note = Synthetic
  source 1..22: mol_type = other DNA
gacaatcaactcgtaattatcc

SEQ ID NO: 1452 - DNA, 22 bp, synthetic construct
  misc_feature 1..22: note = Synthetic
  source 1..22: mol_type = other DNA
gagctgggtccgacaatcaact

SEQ ID NO: 1453 - DNA, 22 bp, synthetic construct
  misc_feature 1..22: note = Synthetic
  source 1..22: mol_type = other DNA
aagattctcctgagctgggtcc

SEQ ID NO: 1454 - DNA, 22 bp, synthetic construct
  misc_feature 1..22: note = Synthetic
  source 1..22: mol_type = other DNA
acagtgaaaagattctcctgag

SEQ ID NO: 1455 - DNA, 22 bp, synthetic construct
  misc_feature 1..22: note = Synthetic
  source 1..22: mol_type = other DNA
gattgcaacaaaccaacagtga

SEQ ID NO: 1456 - DNA, 22 bp, synthetic construct
  misc_feature 1..22: note = Synthetic
  source 1..22: mol_type = other DNA
catggctggattgcaacaaacc

SEQ ID NO: 1457 - DNA, 22 bp, synthetic construct
  misc_feature 1..22: note = Synthetic
  source 1..22: mol_type = other DNA
aatgtaatgaaaaatatcatgg

SEQ ID NO: 1458 - DNA, 22 bp, synthetic construct
  misc_feature 1..22: note = Synthetic
  source 1..22: mol_type = other DNA
catgtaggtcaaaaatgtaatg

SEQ ID NO: 1459 - DNA, 22 bp, synthetic construct
  misc_feature 1..22: note = Synthetic
  source 1..22: mol_type = other DNA
atttccacatgtaggtcaaaaa

SEQ ID NO: 1460 - DNA, 22 bp, synthetic construct
  misc_feature 1..22: note = Synthetic
  source 1..22: mol_type = other DNA
agtccagaaatttaccaacctt

SEQ ID NO: 1461 - DNA, 22 bp, synthetic construct
  misc_feature 1..22: note = Synthetic
  source 1..22: mol_type = other DNA
agaaatttaccaaccttcagga

SEQ ID NO: 1462 - DNA, 22 bp, synthetic construct
  misc_feature 1..22: note = Synthetic
  source 1..22: mol_type = other DNA
aatttaccaaccttcaggatcg

SEQ ID NO: 1463 - DNA, 22 bp, synthetic construct
  misc_feature 1..22: note = Synthetic
  source 1..22: mol_type = other DNA
aggatcgagtagtttctctatg

SEQ ID NO: 1464 - DNA, 22 bp, synthetic construct
  misc_feature 1..22: note = Synthetic
  source 1..22: mol_type = other DNA
tcgagtagtttctctatgccta

SEQ ID NO: 1465 - DNA, 22 bp, synthetic construct
  misc_feature 1..22: note = Synthetic
  source 1..22: mol_type = other DNA
tctctatgcctaattgatatct

SEQ ID NO: 1466 - DNA, 22 bp, synthetic construct
  misc_feature 1..22: note = Synthetic
  source 1..22: mol_type = other DNA
gcctaattgatatctggcgatg

SEQ ID NO: 1467 - DNA, 22 bp, synthetic construct
  misc_feature 1..22: note = Synthetic
  source 1..22: mol_type = other DNA
tctggcgatgttgaatgcatgt

SEQ ID NO: 1468 - DNA, 22 bp, synthetic construct
  misc_feature 1..22: note = Synthetic
  source 1..22: mol_type = other DNA
gactgctggcaaaccacactat

SEQ ID NO: 1469 - DNA, 22 bp, synthetic construct
  misc_feature 1..22: note = Synthetic
  source 1..22: mol_type = other DNA
ctggcaaaccacactattccag

SEQ ID NO: 1470 - DNA, 22 bp, synthetic construct
  misc_feature 1..22: note = Synthetic
  source 1..22: mol_type = other DNA
caaaccacactattccagtcaa

SEQ ID NO: 1471 - DNA, 22 bp, synthetic construct
  misc_feature 1..22: note = Synthetic
  source 1..22: mol_type = other DNA
gagaaactactcgatcctgaag

SEQ ID NO: 1472 - DNA, 22 bp, synthetic construct
  misc_feature 1..22: note = Synthetic
  source 1..22: mol_type = other DNA
catagagaaactactcgatcct

SEQ ID NO: 1473 - DNA, 22 bp, synthetic construct
  misc_feature 1..22: note = Synthetic
  source 1..22: mol_type = other DNA
tcaattaggcatagagaaacta

SEQ ID NO: 1474 - DNA, 22 bp, synthetic construct
  misc_feature 1..22: note = Synthetic
  source 1..22: mol_type = other DNA
catgcattcaacatcgccagat

SEQ ID NO: 1475 - DNA, 22 bp, synthetic construct
  misc_feature 1..22: note = Synthetic
  source 1..22: mol_type = other DNA
ctggaacatgcattcaacatcg

SEQ ID NO: 1476 - DNA, 22 bp, synthetic construct
  misc_feature 1..22: note = Synthetic
  source 1..22: mol_type = other DNA
gactggaatagtgtggtttgcc

SEQ ID NO: 1477 - DNA, 22 bp, synthetic construct
  misc_feature 1..22: note = Synthetic
  source 1..22: mol_type = other DNA
cagacctatttgactggaatag

SEQ ID NO: 1478 - DNA, 22 bp, synthetic construct
  misc_feature 1..22: note = Synthetic
  source 1..22: mol_type = other DNA
taggccagacctatttgactgg

SEQ ID NO: 1479 - DNA, 22 bp, synthetic construct
  misc_feature 1..22: note = Synthetic
  source 1..22: mol_type = other DNA
ttttaggccagacctatttgac

SEQ ID NO: 1480 - DNA, 22 bp, synthetic construct
  misc_feature 1..22: note = Synthetic
  source 1..22: mol_type = other DNA
tcctttacacactttacctgtt

SEQ ID NO: 1481 - DNA, 22 bp, synthetic construct
  misc_feature 1..22: note = Synthetic
  source 1..22: mol_type = other DNA
tttacacactttacctgttgag

SEQ ID NO: 1482 - DNA, 22 bp, synthetic construct
  misc_feature 1..22: note = Synthetic
  source 1..22: mol_type = other DNA
tttacctgttgagaatagtgca

SEQ ID NO: 1483 - DNA, 22 bp, synthetic construct
  misc_feature 1..22: note = Synthetic
  source 1..22: mol_type = other DNA
acctgttgagaatagtgcattt

SEQ ID NO: 1484 - DNA, 22 bp, synthetic construct
  misc_feature 1..22: note = Synthetic
  source 1..22: mol_type = other DNA
tagtgcatttgatgatgtaact

SEQ ID NO: 1485 - DNA, 22 bp, synthetic construct
  misc_feature 1..22: note = Synthetic
  source 1..22: mol_type = other DNA
gatgtaactgaaaatgttcttc

SEQ ID NO: 1486 - DNA, 22 bp, synthetic construct
  misc_feature 1..22: note = Synthetic
  source 1..22: mol_type = other DNA
aaaatgttcttctttagtcact

SEQ ID NO: 1487 - DNA, 22 bp, synthetic construct
  misc_feature 1..22: note = Synthetic
  source 1..22: mol_type = other DNA
gccttggcaacatttccacttc

SEQ ID NO: 1488 - DNA, 22 bp, synthetic construct
  misc_feature 1..22: note = Synthetic
  source 1..22: mol_type = other DNA
acatttccacttcctggatggc

SEQ ID NO: 1489 - DNA, 22 bp, synthetic construct
  misc_feature 1..22: note = Synthetic
  source 1..22: mol_type = other DNA
cacttgttgaggcaaaacttgg

SEQ ID NO: 1490 - DNA, 22 bp, synthetic construct
  misc_feature 1..22: note = Synthetic
  source 1..22: mol_type = other DNA
ttgttgaggcaaaacttggaag

SEQ ID NO: 1491 - DNA, 22 bp, synthetic construct
  misc_feature 1..22: note = Synthetic
  source 1..22: mol_type = other DNA
gaggcaaaacttggaagagtga

SEQ ID NO: 1492 - DNA, 22 bp, synthetic construct
  misc_feature 1..22: note = Synthetic
  source 1..22: mol_type = other DNA
ggaagagtgatgtgatgtacat

SEQ ID NO: 1493 - DNA, 22 bp, synthetic construct
  misc_feature 1..22: note = Synthetic
  source 1..22: mol_type = other DNA
tacattaagatggacttcttat

SEQ ID NO: 1494 - DNA, 22 bp, synthetic construct
  misc_feature 1..22: note = Synthetic
  source 1..22: mol_type = other DNA
ttaagatggacttcttatctgg

SEQ ID NO: 1495 - DNA, 22 bp, synthetic construct
  misc_feature 1..22: note = Synthetic
  source 1..22: mol_type = other DNA
agatggacttcttatctggata

SEQ ID NO: 1496 - DNA, 22 bp, synthetic construct
  misc_feature 1..22: note = Synthetic
  source 1..22: mol_type = other DNA
caaatgcactattctcaacagg

SEQ ID NO: 1497 - DNA, 22 bp, synthetic construct
  misc_feature 1..22: note = Synthetic
  source 1..22: mol_type = other DNA
atcatcaaatgcactattctca

SEQ ID NO: 1498 - DNA, 22 bp, synthetic construct
  misc_feature 1..22: note = Synthetic
  source 1..22: mol_type = other DNA
aagaacattttcagttacatca

SEQ ID NO: 1499 - DNA, 22 bp, synthetic construct
  misc_feature 1..22: note = Synthetic
  source 1..22: mol_type = other DNA
aaagtgactaaagaagaacatt

SEQ ID NO: 1500 - DNA, 22 bp, synthetic construct
  misc_feature 1..22: note = Synthetic
  source 1..22: mol_type = other DNA
tggaaatgttgccaaggccacc

SEQ ID NO: 1501 - DNA, 22 bp, synthetic construct
  misc_feature 1..22: note = Synthetic
  source 1..22: mol_type = other DNA
gcattgaagccatccaggaagt

SEQ ID NO: 1502 - DNA, 22 bp, synthetic construct
  misc_feature 1..22: note = Synthetic
  source 1..22: mol_type = other DNA
aagtgagcattgaagccatcca

SEQ ID NO: 1503 - DNA, 22 bp, synthetic construct
  misc_feature 1..22: note = Synthetic
  source 1..22: mol_type = other DNA
cactcttccaagttttgcctca

SEQ ID NO: 1504 - DNA, 22 bp, synthetic construct
  misc_feature 1..22: note = Synthetic
  source 1..22: mol_type = other DNA
taatgtacatcacatcactctt

SEQ ID NO: 1505 - DNA, 22 bp, synthetic construct
  misc_feature 1..22: note = Synthetic
  source 1..22: mol_type = other DNA
cctatccagataagaagtccat

SEQ ID NO: 1506 - DNA, 22 bp, synthetic construct
  misc_feature 1..22: note = Synthetic
  source 1..22: mol_type = other DNA
gttgataccacctatccagata

SEQ ID NO: 1507 - DNA, 22 bp, synthetic construct
  misc_feature 1..22: note = Synthetic
  source 1..22: mol_type = other DNA
tacagatgttgataccacctat

SEQ ID NO: 1508 - DNA, 22 bp, synthetic construct
  misc_feature 1..22: note = Synthetic
  source 1..22: mol_type = other DNA
taaatgttgacagacctgtgaa

SEQ ID NO: 1509 - DNA, 22 bp, synthetic construct
  misc_feature 1..22: note = Synthetic
  source 1..22: mol_type = other DNA
tgtgaaggaaatgggctccgtg

SEQ ID NO: 1510 - DNA, 22 bp, synthetic construct
  misc_feature 1..22: note = Synthetic
  source 1..22: mol_type = other DNA
gaaatgggctccgtgtagggtc

SEQ ID NO: 1511 - DNA, 22 bp, synthetic construct
  misc_feature 1..22: note = Synthetic
  source 1..22: mol_type = other DNA
atgggctccgtgtagggtcaga

SEQ ID NO: 1512 - DNA, 22 bp, synthetic construct
  misc_feature 1..22: note = Synthetic
  source 1..22: mol_type = other DNA
agcctgtgtgtaggcatagctc

SEQ ID NO: 1513 - DNA, 22 bp, synthetic construct
  misc_feature 1..22: note = Synthetic
  source 1..22: mol_type = other DNA
tcttgaatcgaggcttagggga

SEQ ID NO: 1514 - DNA, 22 bp, synthetic construct
  misc_feature 1..22: note = Synthetic
  source 1..22: mol_type = other DNA
catatccctgtgctagactgac

SEQ ID NO: 1515 - DNA, 22 bp, synthetic construct
  misc_feature 1..22: note = Synthetic
  source 1..22: mol_type = other DNA
ctacacggagcccatttccttc

SEQ ID NO: 1516 - DNA, 22 bp, synthetic construct
  misc_feature 1..22: note = Synthetic
  source 1..22: mol_type = other DNA
gagagaacttcttcccctaagc

SEQ ID NO: 1517 - DNA, 22 bp, synthetic construct
  misc_feature 1..22: note = Synthetic
  source 1..22: mol_type = other DNA
cagatcacggtcagtctagcac

SEQ ID NO: 1518 - DNA, 22 bp, synthetic construct
  misc_feature 1..22: note = Synthetic
  source 1..22: mol_type = other DNA
aaacccttctctgcagatcacg

SEQ ID NO: 1519 - DNA, 22 bp, synthetic construct
  misc_feature 1..22: note = Synthetic
  source 1..22: mol_type = other DNA
aattaacgttttagtttacctc

SEQ ID NO: 1520 - DNA, 22 bp, synthetic construct
  misc_feature 1..22: note = Synthetic
  source 1..22: mol_type = other DNA
tagtttacctcatgagtatgaa

SEQ ID NO: 1521 - DNA, 22 bp, synthetic construct
  misc_feature 1..22: note = Synthetic
  source 1..22: mol_type = other DNA
ctttcaccacttccacatcatt

SEQ ID NO: 1522 - DNA, 22 bp, synthetic construct
  misc_feature 1..22: note = Synthetic
  source 1..22: mol_type = other DNA
attagaaatctctccttgtgct

SEQ ID NO: 1523 - DNA, 22 bp, synthetic construct
  misc_feature 1..22: note = Synthetic
  source 1..22: mol_type = other DNA
tgtgtcctcagcagaaagaagc

SEQ ID NO: 1524 - DNA, 22 bp, synthetic construct
  misc_feature 1..22: note = Synthetic
  source 1..22: mol_type = other DNA
gtcctcagcagaaagaagccac

SEQ ID NO: 1525 - DNA, 22 bp, synthetic construct
  misc_feature 1..22: note = Synthetic
  source 1..22: mol_type = other DNA
gataatacttcttctaaagctg

SEQ ID NO: 1526 - DNA, 22 bp, synthetic construct
  misc_feature 1..22: note = Synthetic
  source 1..22: mol_type = other DNA
acttcttctaaagctgtttgat

SEQ ID NO: 1527 - DNA, 22 bp, synthetic construct
  misc_feature 1..22: note = Synthetic
  source 1..22: mol_type = other DNA
tctaaagctgtttgataacggt

SEQ ID NO: 1528 - DNA, 22 bp, synthetic construct
  misc_feature 1..22: note = Synthetic
  source 1..22: mol_type = other DNA
gtccaggtttacttcactctcc

SEQ ID NO: 1529 - DNA, 22 bp, synthetic construct
  misc_feature 1..22: note = Synthetic
  source 1..22: mol_type = other DNA
ttcactctccatcaatgaactg

SEQ ID NO: 1530 - DNA, 22 bp, synthetic construct
  misc_feature 1..22: note = Synthetic
  source 1..22: mol_type = other DNA
aatgacttgtcttcaggagctt

SEQ ID NO: 1531 - DNA, 22 bp, synthetic construct
  misc_feature 1..22: note = Synthetic
  source 1..22: mol_type = other DNA
tgaaagaccagtttcatactca

SEQ ID NO: 1532 - DNA, 22 bp, synthetic construct
  misc_feature 1..22: note = Synthetic
  source 1..22: mol_type = other DNA
aatgatgtggaagtggtgaaag

SEQ ID NO: 1533 - DNA, 22 bp, synthetic construct
  misc_feature 1..22: note = Synthetic
  source 1..22: mol_type = other DNA
gagagatttctaatgatgtgga

SEQ ID NO: 1534 - DNA, 22 bp, synthetic construct
  misc_feature 1..22: note = Synthetic
  source 1..22: mol_type = other DNA
aaggagagatttctaatgatgt

SEQ ID NO: 1535 - DNA, 22 bp, synthetic construct
  misc_feature 1..22: note = Synthetic
  source 1..22: mol_type = other DNA
gcaagcacaaggagagatttct

SEQ ID NO: 1536 - DNA, 22 bp, synthetic construct
  misc_feature 1..22: note = Synthetic
  source 1..22: mol_type = other DNA
attgcaagcacaaggagagatt

SEQ ID NO: 1537 - DNA, 22 bp, synthetic construct
  misc_feature 1..22: note = Synthetic
  source 1..22: mol_type = other DNA
aggacacattgcaagcacaagg

SEQ ID NO: 1538 - DNA, 22 bp, synthetic construct
  misc_feature 1..22: note = Synthetic
  source 1..22: mol_type = other DNA
accgttatcaaacagctttaga

SEQ ID NO: 1539 - DNA, 22 bp, synthetic construct
  misc_feature 1..22: note = Synthetic
  source 1..22: mol_type = other DNA
ttggcagttcattgatggagag

SEQ ID NO: 1540 - DNA, 22 bp, synthetic construct
  misc_feature 1..22: note = Synthetic
  source 1..22: mol_type = other DNA
gtcatttggcagttcattgatg

SEQ ID NO: 1541 - DNA, 22 bp, synthetic construct
  misc_feature 1..22: note = Synthetic
  source 1..22: mol_type = other DNA
aagacaagtcatttggcagttc

SEQ ID NO: 1542 - DNA, 22 bp, synthetic construct
  misc_feature 1..22: note = Synthetic
  source 1..22: mol_type = other DNA
agctcctgaagacaagtcattt

SEQ ID NO: 1543 - DNA, 22 bp, synthetic construct
  misc_feature 1..22: note = Synthetic
  source 1..22: mol_type = other DNA
cagcatttggaagctcctgaag

SEQ ID NO: 1544 - DNA, 22 bp, synthetic construct
  misc_feature 1..22: note = Synthetic
  source 1..22: mol_type = other DNA
gctaccctgaggcattcccatc

SEQ ID NO: 1545 - DNA, 22 bp, synthetic construct
  misc_feature 1..22: note = Synthetic
  source 1..22: mol_type = other DNA
aggcattcccatcttgaattta

SEQ ID NO: 1546 - DNA, 22 bp, synthetic construct
  misc_feature 1..22: note = Synthetic
  source 1..22: mol_type = other DNA
ggagattcatctgctcttgtac

SEQ ID NO: 1547 - DNA, 22 bp, synthetic construct
  misc_feature 1..22: note = Synthetic
  source 1..22: mol_type = other DNA
ttgtacttcagtttcttcatct

SEQ ID NO: 1548 - DNA, 22 bp, synthetic construct
  misc_feature 1..22: note = Synthetic
  source 1..22: mol_type = other DNA
tacttcagtttcttcatcttct

SEQ ID NO: 1549 - DNA, 22 bp, synthetic construct
  misc_feature 1..22: note = Synthetic
  source 1..22: mol_type = other DNA
catcttctgataattttcctgt

SEQ ID NO: 1550 - DNA, 22 bp, synthetic construct
  misc_feature 1..22: note = Synthetic
  source 1..22: mol_type = other DNA
tcctgttccaatcagcttactt

SEQ ID NO: 1551 - DNA, 22 bp, synthetic construct
  misc_feature 1..22: note = Synthetic
  source 1..22: mol_type = other DNA
caatcagcttacttcccaattg

SEQ ID NO: 1552 - DNA, 22 bp, synthetic construct
  misc_feature 1..22: note = Synthetic
  source 1..22: mol_type = other DNA
tgtagaatattaccaacccggc

SEQ ID NO: 1553 - DNA, 22 bp, synthetic construct
  misc_feature 1..22: note = Synthetic
  source 1..22: mol_type = other DNA
ccaacccggccctgatgggctg

SEQ ID NO: 1554 - DNA, 22 bp, synthetic construct
  misc_feature 1..22: note = Synthetic
  source 1..22: mol_type = other DNA
ctagcatggaaaaacaaagcaa

SEQ ID NO: 1555 - DNA, 22 bp, synthetic construct
  misc_feature 1..22: note = Synthetic
  source 1..22: mol_type = other DNA
gtagctagcatggaaaaacaaa

SEQ ID NO: 1556 - DNA, 22 bp, synthetic construct
  misc_feature 1..22: note = Synthetic
  source 1..22: mol_type = other DNA
taaattcaagatgggaatgcct

SEQ ID NO: 1557 - DNA, 22 bp, synthetic construct
  misc_feature 1..22: note = Synthetic
  source 1..22: mol_type = other DNA
atgaatctcctaaattcaagat

SEQ ID NO: 1558 - DNA, 22 bp, synthetic construct
  misc_feature 1..22: note = Synthetic
  source 1..22: mol_type = other DNA
gagcagatgaatctcctaaatt

SEQ ID NO: 1559 - DNA, 22 bp, synthetic construct
  misc_feature 1..22: note = Synthetic
  source 1..22: mol_type = other DNA
agtacaagagcagatgaatctc

SEQ ID NO: 1560 - DNA, 22 bp, synthetic construct
  misc_feature 1..22: note = Synthetic
  source 1..22: mol_type = other DNA
agaaactgaagtacaagagcag

SEQ ID NO: 1561 - DNA, 22 bp, synthetic construct
  misc_feature 1..22: note = Synthetic
  source 1..22: mol_type = other DNA
atgaagaaactgaagtacaaga

SEQ ID NO: 1562 - DNA, 22 bp, synthetic construct
  misc_feature 1..22: note = Synthetic
  source 1..22: mol_type = other DNA
aattatcagaagatgaagaaac

SEQ ID NO: 1563 - DNA, 22 bp, synthetic construct
  misc_feature 1..22: note = Synthetic
  source 1..22: mol_type = other DNA
gattggaacaggaaaattatca

SEQ ID NO: 1564 - DNA, 22 bp, synthetic construct
  misc_feature 1..22: note = Synthetic
  source 1..22: mol_type = other DNA
ggaagtaagctgattggaacag

SEQ ID NO: 1565 - DNA, 22 bp, synthetic construct
  misc_feature 1..22: note = Synthetic
  source 1..22: mol_type = other DNA
atattctacaattgggaagtaa

SEQ ID NO: 1566 - DNA, 22 bp, synthetic construct
  misc_feature 1..22: note = Synthetic
  source 1..22: mol_type = other DNA
ggttggtaatattctacaattg

SEQ ID NO: 1567 - DNA, 22 bp, synthetic construct
  misc_feature 1..22: note = Synthetic
  source 1..22: mol_type = other DNA
cagggccgggttggtaatattc

SEQ ID NO: 1568 - DNA, 22 bp, synthetic construct
  misc_feature 1..22: note = Synthetic
  source 1..22: mol_type = other DNA
gacagcccatcagggccgggtt

SEQ ID NO: 1569 - DNA, 22 bp, synthetic construct
  misc_feature 1..22: note = Synthetic
  source 1..22: mol_type = other DNA
tttgacagcccatcagggccgg

SEQ ID NO: 1570 - DNA, 22 bp, synthetic construct
  misc_feature 1..22: note = Synthetic
  source 1..22: mol_type = other DNA
tggatttgacagcccatcaggg

SEQ ID NO: 1571 - DNA, 22 bp, synthetic construct
  misc_feature 1..22: note = Synthetic
  source 1..22: mol_type = other DNA
ccttctttgtcaggggtacatg

SEQ ID NO: 1572 - DNA, 22 bp, synthetic construct
  misc_feature 1..22: note = Synthetic
  source 1..22: mol_type = other DNA
acttccttctttgtcaggggta

SEQ ID NO: 1573 - DNA, 22 bp, synthetic construct
  misc_feature 1..22: note = Synthetic
  source 1..22: mol_type = other DNA
ttatgttgttgtacttggcgtt

SEQ ID NO: 1574 - DNA, 22 bp, synthetic construct
  misc_feature 1..22: note = Synthetic
  source 1..22: mol_type = other DNA
tgtacttggcgttttaggtctt

SEQ ID NO: 1575 - DNA, 22 bp, synthetic construct
  misc_feature 1..22: note = Synthetic
  source 1..22: mol_type = other DNA
ttggcgttttaggtcttcaaga

SEQ ID NO: 1576 - DNA, 22 bp, synthetic construct
  misc_feature 1..22: note = Synthetic
  source 1..22: mol_type = other DNA
gttctttcttctgtttttgtta

SEQ ID NO: 1577 - DNA, 22 bp, synthetic construct
  misc_feature 1..22: note = Synthetic
  source 1..22: mol_type = other DNA
tgttagccagtcattcaactct

SEQ ID NO: 1578 - DNA, 22 bp, synthetic construct
  misc_feature 1..22: note = Synthetic
  source 1..22: mol_type = other DNA
cagtcattcaactctttcagtt

SEQ ID NO: 1579 - DNA, 22 bp, synthetic construct
  misc_feature 1..22: note = Synthetic
  source 1..22: mol_type = other DNA
aactctttcagtttctgattct

SEQ ID NO: 1580 - DNA, 22 bp, synthetic construct
  misc_feature 1..22: note = Synthetic
  source 1..22: mol_type = other DNA
ccattaaaactctatgtaaact

SEQ ID NO: 1581 - DNA, 22 bp, synthetic construct
  misc_feature 1..22: note = Synthetic
  source 1..22: mol_type = other DNA
acgccaagtacaacaacataag

SEQ ID NO: 1582 - DNA, 22 bp, synthetic construct
  misc_feature 1..22: note = Synthetic
  source 1..22: mol_type = other DNA
taaaacgccaagtacaacaaca

SEQ ID NO: 1583 - DNA, 22 bp, synthetic construct
  misc_feature 1..22: note = Synthetic
  source 1..22: mol_type = other DNA
ctgatcttgaagacctaaaacg

SEQ ID NO: 1584 - DNA, 22 bp, synthetic construct
  misc_feature 1..22: note = Synthetic
  source 1..22: mol_type = other DNA
aatggaggaagagcctcttgga

SEQ ID NO: 1585 - DNA, 22 bp, synthetic construct
  misc_feature 1..22: note = Synthetic
  source 1..22: mol_type = other DNA
caaaaacagaagaaagaacaag

SEQ ID NO: 1586 - DNA, 22 bp, synthetic construct
  misc_feature 1..22: note = Synthetic
  source 1..22: mol_type = other DNA
ccagaatcagaaactgaaagag

SEQ ID NO: 1587 - DNA, 22 bp, synthetic construct
  misc_feature 1..22: note = Synthetic
  source 1..22: mol_type = other DNA
gatctccagaatcagaaactga

SEQ ID NO: 1588 - DNA, 22 bp, synthetic construct
  misc_feature 1..22: note = Synthetic
  source 1..22: mol_type = other DNA
acatagagttttaatggatctc

SEQ ID NO: 1589 - DNA, 22 bp, synthetic construct
  misc_feature 1..22: note = Synthetic
  source 1..22: mol_type = other DNA
tttcagtttacatagagtttta

SEQ ID NO: 1590 - DNA, 22 bp, synthetic construct
  misc_feature 1..22: note = Synthetic
  source 1..22: mol_type = other DNA
aaattttcagtttacatagagt

SEQ ID NO: 1591 - DNA, 22 bp, synthetic construct
  misc_feature 1..22: note = Synthetic
  source 1..22: mol_type = other DNA
tctttcaaattttcagtttaca

SEQ ID NO: 1592 - DNA, 22 bp, synthetic construct
  misc_feature 1..22: note = Synthetic
  source 1..22: mol_type = other DNA
ccttaagttgttcttccaaagc

SEQ ID NO: 1593 - DNA, 22 bp, synthetic construct
  misc_feature 1..22: note = Synthetic
  source 1..22: mol_type = other DNA
tgttcttccaaagcagcagttg

SEQ ID NO: 1594 - DNA, 22 bp, synthetic construct
  misc_feature 1..22: note = Synthetic
  source 1..22: mol_type = other DNA
agcagcagttgcgtgatctcca

SEQ ID NO: 1595 - DNA, 22 bp, synthetic construct
  misc_feature 1..22: note = Synthetic
  source 1..22: mol_type = other DNA
attcatcaactaccaccaccat

SEQ ID NO: 1596 - DNA, 22 bp, synthetic construct
  misc_feature 1..22: note = Synthetic
  source 1..22: mol_type = other DNA
actaccaccaccatgtgagtga

SEQ ID NO: 1597 - DNA, 22 bp, synthetic construct
  misc_feature 1..22: note = Synthetic
  source 1..22: mol_type = other DNA
ttgaccctgacttgttcttgtt

SEQ ID NO: 1598 - DNA, 22 bp, synthetic construct
  misc_feature 1..22: note = Synthetic
  source 1..22: mol_type = other DNA
gctttggaagaacaacttaagg

SEQ ID NO: 1599 - DNA, 22 bp, synthetic construct
  misc_feature 1..22: note = Synthetic
  source 1..22: mol_type = other DNA
ctgctgctttggaagaacaact

SEQ ID NO: 1600 - DNA, 22 bp, synthetic construct
  misc_feature 1..22: note = Synthetic
  source 1..22: mol_type = other DNA
ggtggtagttgatgaatctagt

SEQ ID NO: 1601 - DNA, 22 bp, synthetic construct
  misc_feature 1..22: note = Synthetic
  source 1..22: mol_type = other DNA
catggtggtggtagttgatgaa

SEQ ID NO: 1602 - DNA, 22 bp, synthetic construct
  misc_feature 1..22: note = Synthetic
  source 1..22: mol_type = other DNA
actcacatggtggtggtagttg

SEQ ID NO: 1603 - DNA, 22 bp, synthetic construct
  misc_feature 1..22: note = Synthetic
  source 1..22: mol_type = other DNA
tctcactcacatggtggtggta

SEQ ID NO: 1604 - DNA, 22 bp, synthetic construct
  misc_feature 1..22: note = Synthetic
  source 1..22: mol_type = other DNA
attctctcactcacatggtggt

SEQ ID NO: 1605 - DNA, 22 bp, synthetic construct
  misc_feature 1..22: note = Synthetic
  source 1..22: mol_type = other DNA
tcaattctctcactcacatggt

SEQ ID NO: 1606 - DNA, 22 bp, synthetic construct
  misc_feature 1..22: note = Synthetic
  source 1..22: mol_type = other DNA
gggtcaattctctcactcacat

SEQ ID NO: 1607 - DNA, 22 bp, synthetic construct
  misc_feature 1..22: note = Synthetic
  source 1..22: mol_type = other DNA
tcagggtcaattctctcactca

SEQ ID NO: 1608 - DNA, 22 bp, synthetic construct
  misc_feature 1..22: note = Synthetic
  source 1..22: mol_type = other DNA
tctagaacaagaacaagtcagg

SEQ ID NO: 1609 - DNA, 22 bp, synthetic construct
  misc_feature 1..22: note = Synthetic
  source 1..22: mol_type = other DNA
aagatctagaacaagaacaagt

SEQ ID NO: 1610 - DNA, 22 bp, synthetic construct
  misc_feature 1..22: note = Synthetic
  source 1..22: mol_type = other DNA
ttcaagaagatctagaacaaga

SEQ ID NO: 1611 - DNA, 22 bp, synthetic construct
  misc_feature 1..22: note = Synthetic
  source 1..22: mol_type = other DNA
ttttatctttcaggtgcttcaa

SEQ ID NO: 1612 - DNA, 22 bp, synthetic construct
  misc_feature 1..22: note = Synthetic
  source 1..22: mol_type = other DNA
ctcacacatgacacacctgttc

SEQ ID NO: 1613 - DNA, 22 bp, synthetic construct
  misc_feature 1..22: note = Synthetic
  source 1..22: mol_type = other DNA
cagtaagacgttgccatttgag

SEQ ID NO: 1614 - DNA, 22 bp, synthetic construct
  misc_feature 1..22: note = Synthetic
  source 1..22: mol_type = other DNA
aggatgtcttgtaaaagaaccc

SEQ ID NO: 1615 - DNA, 22 bp, synthetic construct
  misc_feature 1..22: note = Synthetic
  source 1..22: mol_type = other DNA
cccagcggtcttctgtccatct

SEQ ID NO: 1616 - DNA, 22 bp, synthetic construct
  misc_feature 1..22: note = Synthetic
  source 1..22: mol_type = other DNA
gtccatctacagatgtttgccc

SEQ ID NO: 1617 - DNA, 22 bp, synthetic construct
  misc_feature 1..22: note = Synthetic
  source 1..22: mol_type = other DNA
acagatgtttgcccatcgatct

SEQ ID NO: 1618 - DNA, 22 bp, synthetic construct
  misc_feature 1..22: note = Synthetic
  source 1..22: mol_type = other DNA
aatggcaacgtcttactgaaga

SEQ ID NO: 1619 - DNA, 22 bp, synthetic construct
  misc_feature 1..22: note = Synthetic
  source 1..22: mol_type = other DNA
gttcttttacaagacatccttc

SEQ ID NO: 1620 - DNA, 22 bp, synthetic construct
  misc_feature 1..22: note = Synthetic
  source 1..22: mol_type = other DNA
tctgtagatggacagaagaccg

SEQ ID NO: 1621 - DNA, 22 bp, synthetic construct
  misc_feature 1..22: note = Synthetic
  source 1..22: mol_type = other DNA
ggagatcgatgggcaaacatct

SEQ ID NO: 1622 - DNA, 22 bp, synthetic construct
  misc_feature 1..22: note = Synthetic
  source 1..22: mol_type = other DNA
tctcttctccaggtattgggag

SEQ ID NO: 1623 - DNA, 22 bp, synthetic construct
  misc_feature 1..22: note = Synthetic
  source 1..22: mol_type = other DNA
attgtctcttctccaggtattg

SEQ ID NO: 1624 - DNA, 22 bp, synthetic construct
  misc_feature 1..22: note = Synthetic
  source 1..22: mol_type = other DNA
acatacggccagtttttgaaga

SEQ ID NO: 1625 - DNA, 22 bp, synthetic construct
  misc_feature 1..22: note = Synthetic
  source 1..22: mol_type = other DNA
tgaagacttgataacatttcat

SEQ ID NO: 1626 - DNA, 22 bp, synthetic construct
  misc_feature 1..22: note = Synthetic
  source 1..22: mol_type = other DNA
acatttcattttgatctttaaa

SEQ ID NO: 1627 - DNA, 22 bp, synthetic construct
  misc_feature 1..22: note = Synthetic
  source 1..22: mol_type = other DNA
tttgatctttaaagccagttgt

SEQ ID NO: 1628 - DNA, 22 bp, synthetic construct
  misc_feature 1..22: note = Synthetic
  source 1..22: mol_type = other DNA
taaagatcaaaatgaaatgtta

SEQ ID NO: 1629 - DNA, 22 bp, synthetic construct
  misc_feature 1..22: note = Synthetic
  source 1..22: mol_type = other DNA
caactggctttaaagatcaaaa

SEQ ID NO: 1630 - DNA, 22 bp, synthetic construct
  misc_feature 1..22: note = Synthetic
  source 1..22: mol_type = other DNA
tcacacaactggctttaaagat

SEQ ID NO: 1631 - DNA, 22 bp, synthetic construct
  misc_feature 1..22: note = Synthetic
  source 1..22: mol_type = other DNA
caagattcacacaactggcttt

SEQ ID NO: 1632 - DNA, 22 bp, synthetic construct
  misc_feature 1..22: note = Synthetic
  source 1..22: mol_type = other DNA
cagaaaaagaagatgcagtgaa

SEQ ID NO: 1633 - DNA, 22 bp, synthetic construct
  misc_feature 1..22: note = Synthetic
  source 1..22: mol_type = other DNA
catggctttcagaaaaagaaga

SEQ ID NO: 1634 - DNA, 22 bp, synthetic construct
  misc_feature 1..22: note = Synthetic
  source 1..22: mol_type = other DNA
tagtgcatggctttcagaaaaa

SEQ ID NO: 1635 - DNA, 22 bp, synthetic construct
  misc_feature 1..22: note = Synthetic
  source 1..22: mol_type = other DNA
ctttaatgtcttgcagtgcctt

SEQ ID NO: 1636 - DNA, 22 bp, synthetic construct
  misc_feature 1..22: note = Synthetic
  source 1..22: mol_type = other DNA
actaacctgtgctgtactcttt

SEQ ID NO: 1637 - DNA, 22 bp, synthetic construct
  misc_feature 1..22: note = Synthetic
  source 1..22: mol_type = other DNA
gtactcttttcaagtttttgga

SEQ ID NO: 1638 - DNA, 22 bp, synthetic construct
  misc_feature 1..22: note = Synthetic
  source 1..22: mol_type = other DNA
actaaattatcccaacaccggg

SEQ ID NO: 1639 - DNA, 22 bp, synthetic construct
  misc_feature 1..22: note = Synthetic
  source 1..22: mol_type = other DNA
tatccagccatgcttccgtctt

SEQ ID NO: 1640 - DNA, 22 bp, synthetic construct
  misc_feature 1..22: note = Synthetic
  source 1..22: mol_type = other DNA
cttctgggtcactgacttattc

SEQ ID NO: 1641 - DNA, 22 bp, synthetic construct
  misc_feature 1..22: note = Synthetic
  source 1..22: mol_type = other DNA
gacttattcttcagtgttgaaa

SEQ ID NO: 1642 - DNA, 22 bp, synthetic construct
  misc_feature 1..22: note = Synthetic
  source 1..22: mol_type = other DNA
cagtgttgaaagaagatcttgt

SEQ ID NO: 1643 - DNA, 22 bp, synthetic construct
  misc_feature 1..22: note = Synthetic
  source 1..22: mol_type = other DNA
gttgaaagaagatcttgtttga

SEQ ID NO: 1644 - DNA, 22 bp, synthetic construct
  misc_feature 1..22: note = Synthetic
  source 1..22: mol_type = other DNA
aagaagatcttgtttgagtgaa

SEQ ID NO: 1645 - DNA, 22 bp, synthetic construct
  misc_feature 1..22: note = Synthetic
  source 1..22: mol_type = other DNA
tttgagtgaatacagtttgccc

SEQ ID NO: 1646 - DNA, 22 bp, synthetic construct
  misc_feature 1..22: note = Synthetic
  source 1..22: mol_type = other DNA
cccatggattgctttttctttt

SEQ ID NO: 1647 - DNA, 22 bp, synthetic construct
  misc_feature 1..22: note = Synthetic
  source 1..22: mol_type = other DNA
tgaaaagagtacagcacaggtt

SEQ ID NO: 1648 - DNA, 22 bp, synthetic construct
  misc_feature 1..22: note = Synthetic
  source 1..22: mol_type = other DNA
acttgaaaagagtacagcacag

SEQ ID NO: 1649 - DNA, 22 bp, synthetic construct
  misc_feature 1..22: note = Synthetic
  source 1..22: mol_type = other DNA
aaaaacttgaaaagagtacagc

SEQ ID NO: 1650 - DNA, 22 bp, synthetic construct
  misc_feature 1..22: note = Synthetic
  source 1..22: mol_type = other DNA
taatttagtccaaaaacttgaa

SEQ ID NO: 1651 - DNA, 22 bp, synthetic construct
  misc_feature 1..22: note = Synthetic
  source 1..22: mol_type = other DNA
actttgcccggtgttgggataa

SEQ ID NO: 1652 - DNA, 22 bp, synthetic construct
  misc_feature 1..22: note = Synthetic
  source 1..22: mol_type = other DNA
ggataactttgcccggtgttgg

SEQ ID NO: 1653 - DNA, 22 bp, synthetic construct
  misc_feature 1..22: note = Synthetic
  source 1..22: mol_type = other DNA
gctggataactttgcccggtgt

SEQ ID NO: 1654 - DNA, 22 bp, synthetic construct
  misc_feature 1..22: note = Synthetic
  source 1..22: mol_type = other DNA
gaagcatggctggataactttg

SEQ ID NO: 1655 - DNA, 22 bp, synthetic construct
  misc_feature 1..22: note = Synthetic
  source 1..22: mol_type = other DNA
gacccagaagacggaagcatgg

SEQ ID NO: 1656 - DNA, 22 bp, synthetic construct
  misc_feature 1..22: note = Synthetic
  source 1..22: mol_type = other DNA
ttctttcaacactgaagaataa

SEQ ID NO: 1657 - DNA, 22 bp, synthetic construct
  misc_feature 1..22: note = Synthetic
  source 1..22: mol_type = other DNA
gatcttctttcaacactgaaga

SEQ ID NO: 1658 - DNA, 22 bp, synthetic construct
  misc_feature 1..22: note = Synthetic
  source 1..22: mol_type = other DNA
acaagatcttctttcaacactg

SEQ ID NO: 1659 - DNA, 22 bp, synthetic construct
  misc_feature 1..22: note = Synthetic
  source 1..22: mol_type = other DNA
gggcaaactgtattcactcaaa

SEQ ID NO: 1660 - DNA, 22 bp, synthetic construct
  misc_feature 1..22: note = Synthetic
  source 1..22: mol_type = other DNA
aaagcggatctagaaaagaaaa

SEQ ID NO: 1661 - DNA, 22 bp, synthetic construct
  misc_feature 1..22: note = Synthetic
  source 1..22: mol_type = other DNA
cttgttttaacaggttttaaaa

SEQ ID NO: 1662 - DNA, 22 bp, synthetic construct
  misc_feature 1..22: note = Synthetic
  source 1..22: mol_type = other DNA
gcttaagatgctctcacctttt

SEQ ID NO: 1663 - DNA, 22 bp, synthetic construct
  misc_feature 1..22: note = Synthetic
  source 1..22: mol_type = other DNA
tgctctcaccttttcctaattt

SEQ ID NO: 1664 - DNA, 22 bp, synthetic construct
  misc_feature 1..22: note = Synthetic
  source 1..22: mol_type = other DNA
accttttcctaatttcagaatc

SEQ ID NO: 1665 - DNA, 22 bp, synthetic construct
  misc_feature 1..22: note = Synthetic
  source 1..22: mol_type = other DNA
ttttcctaatttcagaatccac

SEQ ID NO: 1666 - DNA, 22 bp, synthetic construct
  misc_feature 1..22: note = Synthetic
  source 1..22: mol_type = other DNA
agtaatctgcctcttcttttgg

SEQ ID NO: 1667 - DNA, 22 bp, synthetic construct
  misc_feature 1..22: note = Synthetic
  source 1..22: mol_type = other DNA
aatctgcctcttcttttgggga

SEQ ID NO: 1668 - DNA, 22 bp, synthetic construct
  misc_feature 1..22: note = Synthetic
  source 1..22: mol_type = other DNA
ctgcctcttcttttggggaggt

SEQ ID NO: 1669 - DNA, 22 bp, synthetic construct
  misc_feature 1..22: note = Synthetic
  source 1..22: mol_type = other DNA
cttcttttggggaggtggtggt

SEQ ID NO: 1670 - DNA, 22 bp, synthetic construct
  misc_feature 1..22: note = Synthetic
  source 1..22: mol_type = other DNA
gttcctcttgagcatgctttac

SEQ ID NO: 1671 - DNA, 22 bp, synthetic construct
  misc_feature 1..22: note = Synthetic
  source 1..22: mol_type = other DNA
gctttaccaggatctgttccct

SEQ ID NO: 1672 - DNA, 22 bp, synthetic construct
  misc_feature 1..22: note = Synthetic
  source 1..22: mol_type = other DNA
ggatctgttcccttgtggtcac

SEQ ID NO: 1673 - DNA, 22 bp, synthetic construct
  misc_feature 1..22: note = Synthetic
  source 1..22: mol_type = other DNA
tcaccgtagttactgtttccat

SEQ ID NO: 1674 - DNA, 22 bp, synthetic construct
  misc_feature 1..22: note = Synthetic
  source 1..22: mol_type = other DNA
tgtttccattacagttgtctgt

SEQ ID NO: 1675 - DNA, 22 bp, synthetic construct
  misc_feature 1..22: note = Synthetic
  source 1..22: mol_type = other DNA
ttccattacagttgtctgtgtt

SEQ ID NO: 1676 - DNA, 22 bp, synthetic construct
  misc_feature 1..22: note = Synthetic
  source 1..22: mol_type = other DNA
cagttgtctgtgttagtgatgg

SEQ ID NO: 1677 - DNA, 22 bp, synthetic construct
  misc_feature 1..22: note = Synthetic
  source 1..22: mol_type = other DNA
ttgtctgtgttagtgatggctg

SEQ ID NO: 1678 - DNA, 22 bp, synthetic construct
  misc_feature 1..22: note = Synthetic
  source 1..22: mol_type = other DNA
tctgtgttagtgatggctgagt

SEQ ID NO: 1679 - DNA, 22 bp, synthetic construct
  misc_feature 1..22: note = Synthetic
  source 1..22: mol_type = other DNA
gctgagtggtggtgacagcctg

SEQ ID NO: 1680 - DNA, 22 bp, synthetic construct
  misc_feature 1..22: note = Synthetic
  source 1..22: mol_type = other DNA
actgtggattctgaaattagga

SEQ ID NO: 1681 - DNA, 22 bp, synthetic construct
  misc_feature 1..22: note = Synthetic
  source 1..22: mol_type = other DNA
agaggcagattactgtggattc

SEQ ID NO: 1682 - DNA, 22 bp, synthetic construct
  misc_feature 1..22: note = Synthetic
  source 1..22: mol_type = other DNA
ccaaaagaagaggcagattact

SEQ ID NO: 1683 - DNA, 22 bp, synthetic construct
  misc_feature 1..22: note = Synthetic
  source 1..22: mol_type = other DNA
caccacctccccaaaagaagag

SEQ ID NO: 1684 - DNA, 22 bp, synthetic construct
  misc_feature 1..22: note = Synthetic
  source 1..22: mol_type = other DNA
cggtgaccacaagggaacagat

SEQ ID NO: 1685 - DNA, 22 bp, synthetic construct
  misc_feature 1..22: note = Synthetic
  source 1..22: mol_type = other DNA
taactacggtgaccacaaggga

SEQ ID NO: 1686 - DNA, 22 bp, synthetic construct
  misc_feature 1..22: note = Synthetic
  source 1..22: mol_type = other DNA
caactgtaatggaaacagtaac

SEQ ID NO: 1687 - DNA, 22 bp, synthetic construct
  misc_feature 1..22: note = Synthetic
  source 1..22: mol_type = other DNA
taacacagacaactgtaatgga

SEQ ID NO: 1688 - DNA, 22 bp, synthetic construct
  misc_feature 1..22: note = Synthetic
  source 1..22: mol_type = other DNA
agccatcactaacacagacaac

SEQ ID NO: 1689 - DNA, 22 bp, synthetic construct
  misc_feature 1..22: note = Synthetic
  source 1..22: mol_type = other DNA
taacctacattgactttttctt

SEQ ID NO: 1690 - DNA, 22 bp, synthetic construct
  misc_feature 1..22: note = Synthetic
  source 1..22: mol_type = other DNA
ttgactttttcttttaagtctg

SEQ ID NO: 1691 - DNA, 22 bp, synthetic construct
  misc_feature 1..22: note = Synthetic
  source 1..22: mol_type = other DNA
ctgagaagttgccttccttccg

SEQ ID NO: 1692 - DNA, 22 bp, synthetic construct
  misc_feature 1..22: note = Synthetic
  source 1..22: mol_type = other DNA
gttgccttccttccgaaagatt

SEQ ID NO: 1693 - DNA, 22 bp, synthetic construct
  misc_feature 1..22: note = Synthetic
  source 1..22: mol_type = other DNA
gactctgcaacacagcttctga

SEQ ID NO: 1694 - DNA, 22 bp, synthetic construct
  misc_feature 1..22: note = Synthetic
  source 1..22: mol_type = other DNA
tctgcaacacagcttctgagcg

SEQ ID NO: 1695 - DNA, 22 bp, synthetic construct
  misc_feature 1..22: note = Synthetic
  source 1..22: mol_type = other DNA
ttctgagcgagtaatccagctg

SEQ ID NO: 1696 - DNA, 22 bp, synthetic construct
  misc_feature 1..22: note = Synthetic
  source 1..22: mol_type = other DNA
agcgagtaatccagctgtgaag

SEQ ID NO: 1697 - DNA, 22 bp, synthetic construct
  misc_feature 1..22: note = Synthetic
  source 1..22: mol_type = other DNA
agacttaaaagaaaaagtcaat

SEQ ID NO: 1698 - DNA, 22 bp, synthetic construct
  misc_feature 1..22: note = Synthetic
  source 1..22: mol_type = other DNA
cttctcagacttaaaagaaaaa

SEQ ID NO: 1699 - DNA, 22 bp, synthetic construct
  misc_feature 1..22: note = Synthetic
  source 1..22: mol_type = other DNA
gcaacttctcagacttaaaaga

SEQ ID NO: 1700 - DNA, 22 bp, synthetic construct
  misc_feature 1..22: note = Synthetic
  source 1..22: mol_type = other DNA
ctgtgttgcagagtcctgaatt

SEQ ID NO: 1701 - DNA, 22 bp, synthetic construct
  misc_feature 1..22: note = Synthetic
  source 1..22: mol_type = other DNA
tcagaagctgtgttgcagagtc

SEQ ID NO: 1702 - DNA, 22 bp, synthetic construct
  misc_feature 1..22: note = Synthetic
  source 1..22: mol_type = other DNA
tactcgctcagaagctgtgttg

SEQ ID NO: 1703 - DNA, 22 bp, synthetic construct
  misc_feature 1..22: note = Synthetic
  source 1..22: mol_type = other DNA
ttgatataactgaacttcacag

SEQ ID NO: 1704 - DNA, 22 bp, synthetic construct
  misc_feature 1..22: note = Synthetic
  source 1..22: mol_type = other DNA
tttttgctgtcttaggttggat

SEQ ID NO: 1705 - DNA, 22 bp, synthetic construct
  misc_feature 1..22: note = Synthetic
  source 1..22: mol_type = other DNA
catctgttccaccagggcctga

SEQ ID NO: 1706 - DNA, 22 bp, synthetic construct
  misc_feature 1..22: note = Synthetic
  source 1..22: mol_type = other DNA
ctgagctgatctgctggcatct

SEQ ID NO: 1707 - DNA, 22 bp, synthetic construct
  misc_feature 1..22: note = Synthetic
  source 1..22: mol_type = other DNA
cctggtggaacagatggtgaat

SEQ ID NO: 1708 - DNA, 22 bp, synthetic construct
  misc_feature 1..22: note = Synthetic
  source 1..22: mol_type = other DNA
ggccctggtggaacagatggtg

SEQ ID NO: 1709 - DNA, 22 bp, synthetic construct
  misc_feature 1..22: note = Synthetic
  source 1..22: mol_type = other DNA
tcaggccctggtggaacagatg

SEQ ID NO: 1710 - DNA, 22 bp, synthetic construct
  misc_feature 1..22: note = Synthetic
  source 1..22: mol_type = other DNA
cagctcaggccctggtggaaca

SEQ ID NO: 1711 - DNA, 22 bp, synthetic construct
  misc_feature 1..22: note = Synthetic
  source 1..22: mol_type = other DNA
gatcagctcaggccctggtgga

SEQ ID NO: 1712 - DNA, 22 bp, synthetic construct
  misc_feature 1..22: note = Synthetic
  source 1..22: mol_type = other DNA
atgccagcagatcagctcaggc

SEQ ID NO: 1713 - DNA, 22 bp, synthetic construct
  misc_feature 1..22: note = Synthetic
  source 1..22: mol_type = other DNA
ttcagaaaactgcaagatgcca

SEQ ID NO: 1714 - DNA, 22 bp, synthetic construct
  misc_feature 1..22: note = Synthetic
  source 1..22: mol_type = other DNA
agctgagaagttcagaaaactg

SEQ ID NO: 1715 - DNA, 22 bp, synthetic construct
  misc_feature 1..22: note = Synthetic
  source 1..22: mol_type = other DNA
gccatagagcgagaaaaagctg

SEQ ID NO: 1716 - DNA, 22 bp, synthetic construct
  misc_feature 1..22: note = Synthetic
  source 1..22: mol_type = other DNA
aaggagaagagattcttacctt

SEQ ID NO: 1717 - DNA, 22 bp, synthetic construct
  misc_feature 1..22: note = Synthetic
  source 1..22: mol_type = other DNA
ccttacaaatttttaactgact

SEQ ID NO: 1718 - DNA, 22 bp, synthetic construct
  misc_feature 1..22: note = Synthetic
  source 1..22: mol_type = other DNA
ctgacttttaattgctgttggc

SEQ ID NO: 1719 - DNA, 22 bp, synthetic construct
  misc_feature 1..22: note = Synthetic
  source 1..22: mol_type = other DNA
ttttaattgctgttggctctga

SEQ ID NO: 1720 - DNA, 22 bp, synthetic construct
  misc_feature 1..22: note = Synthetic
  source 1..22: mol_type = other DNA
taattgctgttggctctgatgg

SEQ ID NO: 1721 - DNA, 22 bp, synthetic construct
  misc_feature 1..22: note = Synthetic
  source 1..22: mol_type = other DNA
tgctgttggctctgatggggtg

SEQ ID NO: 1722 - DNA, 22 bp, synthetic construct
  misc_feature 1..22: note = Synthetic
  source 1..22: mol_type = other DNA
ttggctctgatggggtggtggg

SEQ ID NO: 1723 - DNA, 22 bp, synthetic construct
  misc_feature 1..22: note = Synthetic
  source 1..22: mol_type = other DNA
ggggtggtgggttggattttca

SEQ ID NO: 1724 - DNA, 22 bp, synthetic construct
  misc_feature 1..22: note = Synthetic
  source 1..22: mol_type = other DNA
gttggattttcaaccagttttc

SEQ ID NO: 1725 - DNA, 22 bp, synthetic construct
  misc_feature 1..22: note = Synthetic
  source 1..22: mol_type = other DNA
ggattttcaaccagttttcagc

SEQ ID NO: 1726 - DNA, 22 bp, synthetic construct
  misc_feature 1..22: note = Synthetic
  source 1..22: mol_type = other DNA
ttcagcagtagttgtcatctgc

SEQ ID NO: 1727 - DNA, 22 bp, synthetic construct
  misc_feature 1..22: note = Synthetic
  source 1..22: mol_type = other DNA
gtcatctgctccaattgttgta

SEQ ID NO: 1728 - DNA, 22 bp, synthetic construct
  misc_feature 1..22: note = Synthetic
  source 1..22: mol_type = other DNA
attgttgtagctgattatagaa

SEQ ID NO: 1729 - DNA, 22 bp, synthetic construct
  misc_feature 1..22: note = Synthetic
  source 1..22: mol_type = other DNA
gttgtagctgattatagaaagc

SEQ ID NO: 1730 - DNA, 22 bp, synthetic construct
  misc_feature 1..22: note = Synthetic
  source 1..22: mol_type = other DNA
ttatagaaagcgatgatgttgt

SEQ ID NO: 1731 - DNA, 22 bp, synthetic construct
  misc_feature 1..22: note = Synthetic
  source 1..22: mol_type = other DNA
atgatgttgttctgatactcca

SEQ ID NO: 1732 - DNA, 22 bp, synthetic construct
  misc_feature 1..22: note = Synthetic
  source 1..22: mol_type = other DNA
gttgttctgatactccagccag

SEQ ID NO: 1733 - DNA, 22 bp, synthetic construct
  misc_feature 1..22: note = Synthetic
  source 1..22: mol_type = other DNA
aagtctctcacttagcaactgg

SEQ ID NO: 1734 - DNA, 22 bp, synthetic construct
  misc_feature 1..22: note = Synthetic
  source 1..22: mol_type = other DNA
tctcacttagcaactggcagaa

SEQ ID NO: 1735 - DNA, 22 bp, synthetic construct
  misc_feature 1..22: note = Synthetic
  source 1..22: mol_type = other DNA
gcagaattcgatccaccggctg

SEQ ID NO: 1736 - DNA, 22 bp, synthetic construct
  misc_feature 1..22: note = Synthetic
  source 1..22: mol_type = other DNA
tgttcagttgttctgaggcttg

SEQ ID NO: 1737 - DNA, 22 bp, synthetic construct
  misc_feature 1..22: note = Synthetic
  source 1..22: mol_type = other DNA
gtcagttaaaaatttgtaaggt

SEQ ID NO: 1738 - DNA, 22 bp, synthetic construct
  misc_feature 1..22: note = Synthetic
  source 1..22: mol_type = other DNA
ttaaaagtcagttaaaaatttg

SEQ ID NO: 1739 - DNA, 22 bp, synthetic construct
  misc_feature 1..22: note = Synthetic
  source 1..22: mol_type = other DNA
caacagcaattaaaagtcagtt

SEQ ID NO: 1740 - DNA, 22 bp, synthetic construct
  misc_feature 1..22: note = Synthetic
  source 1..22: mol_type = other DNA
tcagagccaacagcaattaaaa

SEQ ID NO: 1741 - DNA, 22 bp, synthetic construct
  misc_feature 1..22: note = Synthetic
  source 1..22: mol_type = other DNA
cccatcagagccaacagcaatt

SEQ ID NO: 1742 - DNA, 22 bp, synthetic construct
  misc_feature 1..22: note = Synthetic
  source 1..22: mol_type = other DNA
ccaccaccccatcagagccaac

SEQ ID NO: 1743 - DNA, 22 bp, synthetic construct
  misc_feature 1..22: note = Synthetic
  source 1..22: mol_type = other DNA
caactactgctgaaaactggtt

SEQ ID NO: 1744 - DNA, 22 bp, synthetic construct
  misc_feature 1..22: note = Synthetic
  source 1..22: mol_type = other DNA
cagatgacaactactgctgaaa

SEQ ID NO: 1745 - DNA, 22 bp, synthetic construct
  misc_feature 1..22: note = Synthetic
  source 1..22: mol_type = other DNA
ataatcagctacaacaattgga

SEQ ID NO: 1746 - DNA, 22 bp, synthetic construct
  misc_feature 1..22: note = Synthetic
  source 1..22: mol_type = other DNA
atcgctttctataatcagctac

SEQ ID NO: 1747 - DNA, 22 bp, synthetic construct
  misc_feature 1..22: note = Synthetic
  source 1..22: mol_type = other DNA
tcagaacaacatcatcgctttc

SEQ ID NO: 1748 - DNA, 22 bp, synthetic construct
  misc_feature 1..22: note = Synthetic
  source 1..22: mol_type = other DNA
ctaagtgagagacttaactggc

SEQ ID NO: 1749 - DNA, 22 bp, synthetic construct
  misc_feature 1..22: note = Synthetic
  source 1..22: mol_type = other DNA
gtggatcgaattctgccagttg

SEQ ID NO: 1750 - DNA, 22 bp, synthetic construct
  misc_feature 1..22: note = Synthetic
  source 1..22: mol_type = other DNA
aacagccggtggatcgaattct

SEQ ID NO: 1751 - DNA, 22 bp, synthetic construct
  misc_feature 1..22: note = Synthetic
  source 1..22: mol_type = other DNA
gaacaactgaacagccggtgga

SEQ ID NO: 1752 - DNA, 22 bp, synthetic construct
  misc_feature 1..22: note = Synthetic
  source 1..22: mol_type = other DNA
cctcagaacaactgaacagccg

SEQ ID NO: 1753 - DNA, 22 bp, synthetic construct
  misc_feature 1..22: note = Synthetic
  source 1..22: mol_type = other DNA
caagcctcagaacaactgaaca

SEQ ID NO: 1754 - DNA, 22 bp, synthetic construct
  misc_feature 1..22: note = Synthetic
  source 1..22: mol_type = other DNA
tttctttctagagggtgttaat

SEQ ID NO: 1755 - DNA, 22 bp, synthetic construct
  misc_feature 1..22: note = Synthetic
  source 1..22: mol_type = other DNA
tatttttttctttctagagggt

SEQ ID NO: 1756 - DNA, 22 bp, synthetic construct
  misc_feature 1..22: note = Synthetic
  source 1..22: mol_type = other DNA
tgcacatcagaaaagacttgct

SEQ ID NO: 1757 - DNA, 22 bp, synthetic construct
  misc_feature 1..22: note = Synthetic
  source 1..22: mol_type = other DNA
acatcagaaaagacttgcttaa

SEQ ID NO: 1758 - DNA, 22 bp, synthetic construct
  misc_feature 1..22: note = Synthetic
  source 1..22: mol_type = other DNA
ttaaaatgatttgtaaaggcca

SEQ ID NO: 1759 - DNA, 22 bp, synthetic construct
  misc_feature 1..22: note = Synthetic
  source 1..22: mol_type = other DNA
cacaaagtctgcatccaggaac

SEQ ID NO: 1760 - DNA, 22 bp, synthetic construct
  misc_feature 1..22: note = Synthetic
  source 1..22: mol_type = other DNA
ctttctctttcagggctatgct

SEQ ID NO: 1761 - DNA, 22 bp, synthetic construct
  misc_feature 1..22: note = Synthetic
  source 1..22: mol_type = other DNA
tttcagggctatgctttgaatt

SEQ ID NO: 1762 - DNA, 22 bp, synthetic construct
  misc_feature 1..22: note = Synthetic
  source 1..22: mol_type = other DNA
ctatgctttgaatttttaatcg

SEQ ID NO: 1763 - DNA, 22 bp, synthetic construct
  misc_feature 1..22: note = Synthetic
  source 1..22: mol_type = other DNA
ttgaatttttaatcgttcaatt

SEQ ID NO: 1764 - DNA, 22 bp, synthetic construct
  misc_feature 1..22: note = Synthetic
  source 1..22: mol_type = other DNA
tttaatcgttcaatttgaggtt

SEQ ID NO: 1765 - DNA, 22 bp, synthetic construct
  misc_feature 1..22: note = Synthetic
  source 1..22: mol_type = other DNA
tcgttcaatttgaggttgaaga

SEQ ID NO: 1766 - DNA, 22 bp, synthetic construct
  misc_feature 1..22: note = Synthetic
  source 1..22: mol_type = other DNA
atttgaggttgaagatctgata

SEQ ID NO: 1767 - DNA, 22 bp, synthetic construct
  misc_feature 1..22: note = Synthetic
  source 1..22: mol_type = other DNA
agagagaaagagctacagacaa

SEQ ID NO: 1768 - DNA, 22 bp, synthetic construct
  misc_feature 1..22: note = Synthetic
  source 1..22: mol_type = other DNA
ggccagagagaaagagctacag

SEQ ID NO: 1769 - DNA, 22 bp, synthetic construct
  misc_feature 1..22: note = Synthetic
  source 1..22: mol_type = other DNA
aaatcattttaagcaagtcttt

SEQ ID NO: 1770 - DNA, 22 bp, synthetic construct
  misc_feature 1..22: note = Synthetic
  source 1..22: mol_type = other DNA
tggcctttacaaatcattttaa

SEQ ID NO: 1771 - DNA, 22 bp, synthetic construct
  misc_feature 1..22: note = Synthetic
  source 1..22: mol_type = other DNA
ggatgcagactttgtggccttt

SEQ ID NO: 1772 - DNA, 22 bp, synthetic construct
  misc_feature 1..22: note = Synthetic
  source 1..22: mol_type = other DNA
gaaaggacaaggacccatgttc

SEQ ID NO: 1773 - DNA, 22 bp, synthetic construct
  misc_feature 1..22: note = Synthetic
  source 1..22: mol_type = other DNA
ttcaacctcaaattgaacgatt

SEQ ID NO: 1774 - DNA, 22 bp, synthetic construct
  misc_feature 1..22: note = Synthetic
  source 1..22: mol_type = other DNA
tcagatcttcaacctcaaattg

SEQ ID NO: 1775 - DNA, 22 bp, synthetic construct
  misc_feature 1..22: note = Synthetic
  source 1..22: mol_type = other DNA
accggctatcagatcttcaacc

SEQ ID NO: 1776 - DNA, 22 bp, synthetic construct
  misc_feature 1..22: note = Synthetic
  source 1..22: mol_type = other DNA
acaggatgaagtcaaccggcta

SEQ ID NO: 1777 - DNA, 22 bp, synthetic construct
  misc_feature 1..22: note = Synthetic
  source 1..22: mol_type = other DNA
atattcacagacctgcaattcc

SEQ ID NO: 1778 - DNA, 22 bp, synthetic construct
  misc_feature 1..22: note = Synthetic
  source 1..22: mol_type = other DNA
gcaattccccgagtctctgctc

SEQ ID NO: 1779 - DNA, 22 bp, synthetic construct
  misc_feature 1..22: note = Synthetic
  source 1..22: mol_type = other DNA
ccgagtctctgctccatgattt

SEQ ID NO: 1780 - DNA, 22 bp, synthetic construct
  misc_feature 1..22: note = Synthetic
  source 1..22: mol_type = other DNA
gtctctgctccatgatttcata

SEQ ID NO: 1781 - DNA, 22 bp, synthetic construct
  misc_feature 1..22: note = Synthetic
  source 1..22: mol_type = other DNA
catgatttcatagtcggtgaca

SEQ ID NO: 1782 - DNA, 22 bp, synthetic construct
  misc_feature 1..22: note = Synthetic
  source 1..22: mol_type = other DNA
ttcatagtcggtgacactaagt

SEQ ID NO: 1783 - DNA, 22 bp, synthetic construct
  misc_feature 1..22: note = Synthetic
  source 1..22: mol_type = other DNA
ggtgacactaagttgaggtatg

SEQ ID NO: 1784 - DNA, 22 bp, synthetic construct
  misc_feature 1..22: note = Synthetic
  source 1..22: mol_type = other DNA
cactaagttgaggtatggagag

SEQ ID NO: 1785 - DNA, 22 bp, synthetic construct
  misc_feature 1..22: note = Synthetic
  source 1..22: mol_type = other DNA
tttctgactgctggacccatgt

SEQ ID NO: 1786 - DNA, 22 bp, synthetic construct
  misc_feature 1..22: note = Synthetic
  source 1..22: mol_type = other DNA
ggacccatgtcctgatggcact

SEQ ID NO: 1787 - DNA, 22 bp, synthetic construct
  misc_feature 1..22: note = Synthetic
  source 1..22: mol_type = other DNA
gtcctgatggcactcatggtct

SEQ ID NO: 1788 - DNA, 22 bp, synthetic construct
  misc_feature 1..22: note = Synthetic
  source 1..22: mol_type = other DNA
actcatggtctcctgatagcgc

SEQ ID NO: 1789 - DNA, 22 bp, synthetic construct
  misc_feature 1..22: note = Synthetic
  source 1..22: mol_type = other DNA
tctcctgatagcgcattggtgg

SEQ ID NO: 1790 - DNA, 22 bp, synthetic construct
  misc_feature 1..22: note = Synthetic
  source 1..22: mol_type = other DNA
tggagcagagactcggggaatt

SEQ ID NO: 1791 - DNA, 22 bp, synthetic construct
  misc_feature 1..22: note = Synthetic
  source 1..22: mol_type = other DNA
gaaatcatggagcagagactcg

SEQ ID NO: 1792 - DNA, 22 bp, synthetic construct
  misc_feature 1..22: note = Synthetic
  source 1..22: mol_type = other DNA
ctcaacttagtgtcaccgacta

SEQ ID NO: 1793 - DNA, 22 bp, synthetic construct
  misc_feature 1..22: note = Synthetic
  source 1..22: mol_type = other DNA
aaccaaactctccatacctcaa

SEQ ID NO: 1794 - DNA, 22 bp, synthetic construct
  misc_feature 1..22: note = Synthetic
  source 1..22: mol_type = other DNA
agtgccatcaggacatgggtcc

SEQ ID NO: 1795 - DNA, 22 bp, synthetic construct
  misc_feature 1..22: note = Synthetic
  source 1..22: mol_type = other DNA
agaccatgagtgccatcaggac

SEQ ID NO: 1796 - DNA, 22 bp, synthetic construct
  misc_feature 1..22: note = Synthetic
  source 1..22: mol_type = other DNA
accaatgcgctatcaggagacc

SEQ ID NO: 1797 - DNA, 22 bp, synthetic construct
  misc_feature 1..22: note = Synthetic
  source 1..22: mol_type = other DNA
ataaagtttttgacactttgcc

SEQ ID NO: 1798 - DNA, 22 bp, synthetic construct
  misc_feature 1..22: note = Synthetic
  source 1..22: mol_type = other DNA
atcttgaattacctgaattttt

SEQ ID NO: 1799 - DNA, 22 bp, synthetic construct
  misc_feature 1..22: note = Synthetic
  source 1..22: mol_type = other DNA
ttcatttgctcctctagctttt

SEQ ID NO: 1800 - DNA, 22 bp, synthetic construct
  misc_feature 1..22: note = Synthetic
  source 1..22: mol_type = other DNA
aggagagcttcttccagcgtcc

SEQ ID NO: 1801 - DNA, 22 bp, synthetic construct
  misc_feature 1..22: note = Synthetic
  source 1..22: mol_type = other DNA
cttccagcgtccctcaatttct

SEQ ID NO: 1802 - DNA, 22 bp, synthetic construct
  misc_feature 1..22: note = Synthetic
  source 1..22: mol_type = other DNA
gcgtccctcaatttcttcaaat

SEQ ID NO: 1803 - DNA, 22 bp, synthetic construct
  misc_feature 1..22: note = Synthetic
  source 1..22: mol_type = other DNA
ccctcaatttcttcaaattctg

SEQ ID NO: 1804 - DNA, 22 bp, synthetic construct
  misc_feature 1..22: note = Synthetic
  source 1..22: mol_type = other DNA
caaattctgattgatatttccg

SEQ ID NO: 1805 - DNA, 22 bp, synthetic construct
  misc_feature 1..22: note = Synthetic
  source 1..22: mol_type = other DNA
gcgctttcttcgacatctcttt

SEQ ID NO: 1806 - DNA, 22 bp, synthetic construct
  misc_feature 1..22: note = Synthetic
  source 1..22: mol_type = other DNA
ctttcttcgacatctctttcac

SEQ ID NO: 1807 - DNA, 22 bp, synthetic construct
  misc_feature 1..22: note = Synthetic
  source 1..22: mol_type = other DNA
gacatctctttcacagtggtgc

SEQ ID NO: 1808 - DNA, 22 bp, synthetic construct
  misc_feature 1..22: note = Synthetic
  source 1..22: mol_type = other DNA
atctctttcacagtggtgctga

SEQ ID NO: 1809 - DNA, 22 bp, synthetic construct
  misc_feature 1..22: note = Synthetic
  source 1..22: mol_type = other DNA
tgaataaactccgaaaaattca

SEQ ID NO: 1810 - DNA, 22 bp, synthetic construct
  misc_feature 1..22: note = Synthetic
  source 1..22: mol_type = other DNA
aaatgaataaactccgaaaaat

SEQ ID NO: 1811 - DNA, 22 bp, synthetic construct
  misc_feature 1..22: note = Synthetic
  source 1..22: mol_type = other DNA
aggagcaaatgaataaactccg

SEQ ID NO: 1812 - DNA, 22 bp, synthetic construct
  misc_feature 1..22: note = Synthetic
  source 1..22: mol_type = other DNA
ttgtcaaaagctagaggagcaa

SEQ ID NO: 1813 - DNA, 22 bp, synthetic construct
  misc_feature 1..22: note = Synthetic
  source 1..22: mol_type = other DNA
agcattgtcaaaagctagagga

SEQ ID NO: 1814 - DNA, 22 bp, synthetic construct
  misc_feature 1..22: note = Synthetic
  source 1..22: mol_type = other DNA
gctggaagaagctctcctccca

SEQ ID NO: 1815 - DNA, 22 bp, synthetic construct
  misc_feature 1..22: note = Synthetic
  source 1..22: mol_type = other DNA
ggaaatatcaatcagaatttga

SEQ ID NO: 1816 - DNA, 22 bp, synthetic construct
  misc_feature 1..22: note = Synthetic
  source 1..22: mol_type = other DNA
gaaattagccggaaatatcaat

SEQ ID NO: 1817 - DNA, 22 bp, synthetic construct
  misc_feature 1..22: note = Synthetic
  source 1..22: mol_type = other DNA
ccctctgaaattagccggaaat

SEQ ID NO: 1818 - DNA, 22 bp, synthetic construct
  misc_feature 1..22: note = Synthetic
  source 1..22: mol_type = other DNA
aaagcgccctctgaaattagcc

SEQ ID NO: 1819 - DNA, 22 bp, synthetic construct
  misc_feature 1..22: note = Synthetic
  source 1..22: mol_type = other DNA
agatgtcgaagaaagcgccctc

SEQ ID NO: 1820 - DNA, 22 bp, synthetic construct
  misc_feature 1..22: note = Synthetic
  source 1..22: mol_type = other DNA
actatctcagcaccactgtgaa

SEQ ID NO: 1821 - DNA, 22 bp, synthetic construct
  misc_feature 1..22: note = Synthetic
  source 1..22: mol_type = other DNA
acaaagttctctgcaagagcaa

SEQ ID NO: 1822 - DNA, 22 bp, synthetic construct
  misc_feature 1..22: note = Synthetic
  source 1..22: mol_type = other DNA
aaaaattgttttttaggcttta

SEQ ID NO: 1823 - DNA, 22 bp, synthetic construct
  misc_feature 1..22: note = Synthetic
  source 1..22: mol_type = other DNA
tgcactgtttcagctgcttttt

SEQ ID NO: 1824 - DNA, 22 bp, synthetic construct
  misc_feature 1..22: note = Synthetic
  source 1..22: mol_type = other DNA
ttcagctgcttttttagaattt

SEQ ID NO: 1825 - DNA, 22 bp, synthetic construct
  misc_feature 1..22: note = Synthetic
  source 1..22: mol_type = other DNA
caacttcagccatccatttctt

SEQ ID NO: 1826 - DNA, 22 bp, synthetic construct
  misc_feature 1..22: note = Synthetic
  source 1..22: mol_type = other DNA
atccatttcttcagggtttgta

SEQ ID NO: 1827 - DNA, 22 bp, synthetic construct
  misc_feature 1..22: note = Synthetic
  source 1..22: mol_type = other DNA
aagcagctgaaacagtgcagag

SEQ ID NO: 1828 - DNA, 22 bp, synthetic construct
  misc_feature 1..22: note = Synthetic
  source 1..22: mol_type = other DNA
taaaaaagcagctgaaacagtg

SEQ ID NO: 1829 - DNA, 22 bp, synthetic construct
  misc_feature 1..22: note = Synthetic
  source 1..22: mol_type = other DNA
gaaattctaaaaaagcagctga

SEQ ID NO: 1830 - DNA, 22 bp, synthetic construct
  misc_feature 1..22: note = Synthetic
  source 1..22: mol_type = other DNA
aatggcctgcccttggggattc

SEQ ID NO: 1831 - DNA, 22 bp, synthetic construct
  misc_feature 1..22: note = Synthetic
  source 1..22: mol_type = other DNA
gaaggaggaatggcctgccctt

SEQ ID NO: 1832 - DNA, 22 bp, synthetic construct
  misc_feature 1..22: note = Synthetic
  source 1..22: mol_type = other DNA
gaagttgatgtttttctgaagg

SEQ ID NO: 1833 - DNA, 22 bp, synthetic construct
  misc_feature 1..22: note = Synthetic
  source 1..22: mol_type = other DNA
cctgaagaaatggatggctgaa

SEQ ID NO: 1834 - DNA, 22 bp, synthetic construct
  misc_feature 1..22: note = Synthetic
  source 1..22: mol_type = other DNA
aaaccctgaagaaatggatggc

SEQ ID NO: 1835 - DNA, 22 bp, synthetic construct
  misc_feature 1..22: note = Synthetic
  source 1..22: mol_type = other DNA
atcacatacaaaccctgaagaa

SEQ ID NO: 1836 - DNA, 22 bp, synthetic construct
  misc_feature 1..22: note = Synthetic
  source 1..22: mol_type = other DNA
cagaatcacatacaaaccctga

SEQ ID NO: 1837 - DNA, 22 bp, synthetic construct
  misc_feature 1..22: note = Synthetic
  source 1..22: mol_type = other DNA
attgtctatacctgttggcaca

SEQ ID NO: 1838 - DNA, 22 bp, synthetic construct
  misc_feature 1..22: note = Synthetic
  source 1..22: mol_type = other DNA
cctgttggcacatgtgatccca

SEQ ID NO: 1839 - DNA, 22 bp, synthetic construct
  misc_feature 1..22: note = Synthetic
  source 1..22: mol_type = other DNA
gcacatgtgatcccactgagtg

SEQ ID NO: 1840 - DNA, 22 bp, synthetic construct
  misc_feature 1..22: note = Synthetic
  source 1..22: mol_type = other DNA
atcccactgagtgttaagttct

SEQ ID NO: 1841 - DNA, 22 bp, synthetic construct
  misc_feature 1..22: note = Synthetic
  source 1..22: mol_type = other DNA
gttaagttctttgagttctgtc

SEQ ID NO: 1842 - DNA, 22 bp, synthetic construct
  misc_feature 1..22: note = Synthetic
  source 1..22: mol_type = other DNA
cattgacactgtttagactggg

SEQ ID NO: 1843 - DNA, 22 bp, synthetic construct
  misc_feature 1..22: note = Synthetic
  source 1..22: mol_type = other DNA
tgtttagactgggctgaattgt

SEQ ID NO: 1844 - DNA, 22 bp, synthetic construct
  misc_feature 1..22: note = Synthetic
  source 1..22: mol_type = other DNA
ctcagtgggatcacatgtgcca

SEQ ID NO: 1845 - DNA, 22 bp, synthetic construct
  misc_feature 1..22: note = Synthetic
  source 1..22: mol_type = other DNA
actcaaagaacttaacactcag

SEQ ID NO: 1846 - DNA, 22 bp, synthetic construct
  misc_feature 1..22: note = Synthetic
  source 1..22: mol_type = other DNA
acagaactcaaagaacttaaca

SEQ ID NO: 1847 - DNA, 22 bp, synthetic construct
  misc_feature 1..22: note = Synthetic
  source 1..22: mol_type = other DNA
aagataaagaatgaagcagagc

SEQ ID NO: 1848 - DNA, 22 bp, synthetic construct
  misc_feature 1..22: note = Synthetic
  source 1..22: mol_type = other DNA
caatgaaggtgggcagaagata

SEQ ID NO: 1849 - DNA, 22 bp, synthetic construct
  misc_feature 1..22: note = Synthetic
  source 1..22: mol_type = other DNA
acagtgtcaatgaaggtgggca

SEQ ID NO: 1850 - DNA, 22 bp, synthetic construct
  misc_feature 1..22: note = Synthetic
  source 1..22: mol_type = other DNA
gcccagtctaaacagtgtcaat

SEQ ID NO: 1851 - DNA, 22 bp, synthetic construct
  misc_feature 1..22: note = Synthetic
  source 1..22: mol_type = other DNA
aattcagcccagtctaaacagt

SEQ ID NO: 1852 - DNA, 22 bp, synthetic construct
  misc_feature 1..22: note = Synthetic
  source 1..22: mol_type = other DNA
tcagacaattcagcccagtcta

SEQ ID NO: 1853 - DNA, 22 bp, synthetic construct
  misc_feature 1..22: note = Synthetic
  source 1..22: mol_type = other DNA
cagtgatattcagacaattcag

SEQ ID NO: 1854 - DNA, 22 bp, synthetic construct
  misc_feature 1..22: note = Synthetic
  source 1..22: mol_type = other DNA
agcttttagtcagtgatattca

SEQ ID NO: 1855 - DNA, 22 bp, synthetic construct
  misc_feature 1..22: note = Synthetic
  source 1..22: mol_type = other DNA
tttattttcttagcttttagtc

SEQ ID NO: 1856 - DNA, 22 bp, synthetic construct
  misc_feature 1..22: note = Synthetic
  source 1..22: mol_type = other DNA
tgatttattttcttagctttta

SEQ ID NO: 1857 - DNA, 22 bp, synthetic construct
  misc_feature 1..22: note = Synthetic
  source 1..22: mol_type = other DNA
cttcatctcttcaactgctttc

SEQ ID NO: 1858 - DNA, 22 bp, synthetic construct
  misc_feature 1..22: note = Synthetic
  source 1..22: mol_type = other DNA
caactgctttctgtaattcatc

SEQ ID NO: 1859 - DNA, 22 bp, synthetic construct
  misc_feature 1..22: note = Synthetic
  source 1..22: mol_type = other DNA
aattcatctggagttttatatt

SEQ ID NO: 1860 - DNA, 22 bp, synthetic construct
  misc_feature 1..22: note = Synthetic
  source 1..22: mol_type = other DNA
gttttatattcaaaatctctct

SEQ ID NO: 1861 - DNA, 22 bp, synthetic construct
  misc_feature 1..22: note = Synthetic
  source 1..22: mol_type = other DNA
ttgtgtcatccattcgtgcatc

SEQ ID NO: 1862 - DNA, 22 bp, synthetic construct
  misc_feature 1..22: note = Synthetic
  source 1..22: mol_type = other DNA
gtcatccattcgtgcatctctg

SEQ ID NO: 1863 - DNA, 22 bp, synthetic construct
  misc_feature 1..22: note = Synthetic
  source 1..22: mol_type = other DNA
ctgatagatctttctggaggct

SEQ ID NO: 1864 - DNA, 22 bp, synthetic construct
  misc_feature 1..22: note = Synthetic
  source 1..22: mol_type = other DNA
tacagaaagcagttgaagagat

SEQ ID NO: 1865 - DNA, 22 bp, synthetic construct
  misc_feature 1..22: note = Synthetic
  source 1..22: mol_type = other DNA
atgaattacagaaagcagttga

SEQ ID NO: 1866 - DNA, 22 bp, synthetic construct
  misc_feature 1..22: note = Synthetic
  source 1..22: mol_type = other DNA
aaactccagatgaattacagaa

SEQ ID NO: 1867 - DNA, 22 bp, synthetic construct
  misc_feature 1..22: note = Synthetic
  source 1..22: mol_type = other DNA
gattttgaatataaaactccag

SEQ ID NO: 1868 - DNA, 22 bp, synthetic construct
  misc_feature 1..22: note = Synthetic
  source 1..22: mol_type = other DNA
gagagattttgaatataaaact

SEQ ID NO: 1869 - DNA, 22 bp, synthetic construct
  misc_feature 1..22: note = Synthetic
  source 1..22: mol_type = other DNA
gaagagtatcttgagagagatt

SEQ ID NO: 1870 - DNA, 22 bp, synthetic construct
  misc_feature 1..22: note = Synthetic
  source 1..22: mol_type = other DNA
agctgaagaagagtatcttgag

SEQ ID NO: 1871 - DNA, 22 bp, synthetic construct
  misc_feature 1..22: note = Synthetic
  source 1..22: mol_type = other DNA
gaatggatgacacaagctgaag

SEQ ID NO: 1872 - DNA, 22 bp, synthetic construct
  misc_feature 1..22: note = Synthetic
  source 1..22: mol_type = other DNA
aagatctatcagagatgcacga

SEQ ID NO: 1873 - DNA, 22 bp, synthetic construct
  misc_feature 1..22: note = Synthetic
  source 1..22: mol_type = other DNA
cagaaagatctatcagagatgc

SEQ ID NO: 1874 - DNA, 22 bp, synthetic construct
  misc_feature 1..22: note = Synthetic
  source 1..22: mol_type = other DNA
taagcctccagaaagatctatc

SEQ ID NO: 1875 - DNA, 22 bp, synthetic construct
  misc_feature 1..22: note = Synthetic
  source 1..22: mol_type = other DNA
ggagaaaactgtaagcctccag

SEQ ID NO: 1876 - DNA, 22 bp, synthetic construct
  misc_feature 1..22: note = Synthetic
  source 1..22: mol_type = other DNA
tgccagaaaggaggccttgaag

SEQ ID NO: 1877 - DNA, 22 bp, synthetic construct
  misc_feature 1..22: note = Synthetic
  source 1..22: mol_type = other DNA
accaagaaaagcaactgacttc

SEQ ID NO: 1878 - DNA, 22 bp, synthetic construct
  misc_feature 1..22: note = Synthetic
  source 1..22: mol_type = other DNA
aagtcttgcatttcccattcag

SEQ ID NO: 1879 - DNA, 22 bp, synthetic construct
  misc_feature 1..22: note = Synthetic
  source 1..22: mol_type = other DNA
ccattcagcctagtgcagagcc

SEQ ID NO: 1880 - DNA, 22 bp, synthetic construct
  misc_feature 1..22: note = Synthetic
  source 1..22: mol_type = other DNA
ttcagcctagtgcagagccact

SEQ ID NO: 1881 - DNA, 22 bp, synthetic construct
  misc_feature 1..22: note = Synthetic
  source 1..22: mol_type = other DNA
gcctagtgcagagccactggta

SEQ ID NO: 1882 - DNA, 22 bp, synthetic construct
  misc_feature 1..22: note = Synthetic
  source 1..22: mol_type = other DNA
tagtgcagagccactggtagtt

SEQ ID NO: 1883 - DNA, 22 bp, synthetic construct
  misc_feature 1..22: note = Synthetic
  source 1..22: mol_type = other DNA
agagccactggtagttggtggt

SEQ ID NO: 1884 - DNA, 22 bp, synthetic construct
  misc_feature 1..22: note = Synthetic
  source 1..22: mol_type = other DNA
ctggtagttggtggttagagtt

SEQ ID NO: 1885 - DNA, 22 bp, synthetic construct
  misc_feature 1..22: note = Synthetic
  source 1..22: mol_type = other DNA
cttttttaaggcctcttgtgct

SEQ ID NO: 1886 - DNA, 22 bp, synthetic construct
  misc_feature 1..22: note = Synthetic
  source 1..22: mol_type = other DNA
gagctatgacactatttacaga

SEQ ID NO: 1887 - DNA, 22 bp, synthetic construct
  misc_feature 1..22: note = Synthetic
  source 1..22: mol_type = other DNA
gacactatttacagactcagta

SEQ ID NO: 1888 - DNA, 22 bp, synthetic construct
  misc_feature 1..22: note = Synthetic
  source 1..22: mol_type = other DNA
tgggaaatgcaagactttggaa

SEQ ID NO: 1889 - DNA, 22 bp, synthetic construct
  misc_feature 1..22: note = Synthetic
  source 1..22: mol_type = other DNA
tgaatgggaaatgcaagacttt

SEQ ID NO: 1890 - DNA, 22 bp, synthetic construct
  misc_feature 1..22: note = Synthetic
  source 1..22: mol_type = other DNA
tggctctgcactaggctgaatg

SEQ ID NO: 1891 - DNA, 22 bp, synthetic construct
  misc_feature 1..22: note = Synthetic
  source 1..22: mol_type = other DNA
ctaccagtggctctgcactagg

SEQ ID NO: 1892 - DNA, 22 bp, synthetic construct
  misc_feature 1..22: note = Synthetic
  source 1..22: mol_type = other DNA
cttgaaactctaaccaccaact

SEQ ID NO: 1893 - DNA, 22 bp, synthetic construct
  misc_feature 1..22: note = Synthetic
  source 1..22: mol_type = other DNA
gaaactccttactgagtctgta

SEQ ID NO: 1894 - DNA, 22 bp, synthetic construct
  misc_feature 1..22: note = Synthetic
  source 1..22: mol_type = other DNA
agtgaaactccttactgagtct

SEQ ID NO: 1895 - DNA, 22 bp, synthetic construct
  misc_feature 1..22: note = Synthetic
  source 1..22: mol_type = other DNA
gaagcgaaagtgaaactcctta

SEQ ID NO: 1896 - DNA, 22 bp, synthetic construct
  misc_feature 1..22: note = Synthetic
  source 1..22: mol_type = other DNA
aagaggcccaacaaaaagaagc

SEQ ID NO: 1897 - DNA, 22 bp, synthetic construct
  misc_feature 1..22: note = Synthetic
  source 1..22: mol_type = other DNA
tacaacttacatctagcacctc

SEQ ID NO: 1898 - DNA, 22 bp, synthetic construct
  misc_feature 1..22: note = Synthetic
  source 1..22: mol_type = other DNA
cagagatttcctcagctccgcc

SEQ ID NO: 1899 - DNA, 22 bp, synthetic construct
  misc_feature 1..22: note = Synthetic
  source 1..22: mol_type = other DNA
cctcagctccgccaggaatgtt

SEQ ID NO: 1900 - DNA, 22 bp, synthetic construct
  misc_feature 1..22: note = Synthetic
  source 1..22: mol_type = other DNA
cagctccgccaggaatgttttc

SEQ ID NO: 1901 - DNA, 22 bp, synthetic construct
  misc_feature 1..22: note = Synthetic
  source 1..22: mol_type = other DNA
gccaggaatgttttcagtggtt

SEQ ID NO: 1902 - DNA, 22 bp, synthetic construct
  misc_feature 1..22: note = Synthetic
  source 1..22: mol_type = other DNA
aatgttttcagtggttttaagt

SEQ ID NO: 1903 - DNA, 22 bp, synthetic construct
  misc_feature 1..22: note = Synthetic
  source 1..22: mol_type = other DNA
tttagccacttgtttgctttct

SEQ ID NO: 1904 - DNA, 22 bp, synthetic construct
  misc_feature 1..22: note = Synthetic
  source 1..22: mol_type = other DNA
cttgtttgctttctccaagtat

SEQ ID NO: 1905 - DNA, 22 bp, synthetic construct
  misc_feature 1..22: note = Synthetic
  source 1..22: mol_type = other DNA
ggaaatctctgaggtgctagat

SEQ ID NO: 1906 - DNA, 22 bp, synthetic construct
  misc_feature 1..22: note = Synthetic
  source 1..22: mol_type = other DNA
agctgaggaaatctctgaggtg

SEQ ID NO: 1907 - DNA, 22 bp, synthetic construct
  misc_feature 1..22: note = Synthetic
  source 1..22: mol_type = other DNA
ctggcggagctgaggaaatctc

SEQ ID NO: 1908 - DNA, 22 bp, synthetic construct
  misc_feature 1..22: note = Synthetic
  source 1..22: mol_type = other DNA
aaaacattcctggcggagctga

SEQ ID NO: 1909 - DNA, 22 bp, synthetic construct
  misc_feature 1..22: note = Synthetic
  source 1..22: mol_type = other DNA
gcaaacaagtggctaaatgaag

SEQ ID NO: 1910 - DNA, 22 bp, synthetic construct
  misc_feature 1..22: note = Synthetic
  source 1..22: mol_type = other DNA
agaaagcaaacaagtggctaaa

SEQ ID NO: 1911 - DNA, 22 bp, synthetic construct
  misc_feature 1..22: note = Synthetic
  source 1..22: mol_type = other DNA
cttggagaaagcaaacaagtgg

SEQ ID NO: 1912 - DNA, 22 bp, synthetic construct
  misc_feature 1..22: note = Synthetic
  source 1..22: mol_type = other DNA
ttgtcatacttggagaaagcaa

SEQ ID NO: 1913 - DNA, 22 bp, synthetic construct
  misc_feature 1..22: note = Synthetic
  source 1..22: mol_type = other DNA
taggaagtttgggcatgttggc

SEQ ID NO: 1914 - DNA, 22 bp, synthetic construct
  misc_feature 1..22: note = Synthetic
  source 1..22: mol_type = other DNA
cacttatcttcatacctcttca

SEQ ID NO: 1915 - DNA, 22 bp, synthetic construct
  misc_feature 1..22: note = Synthetic
  source 1..22: mol_type = other DNA
tcttcatgtagttccctccaac

SEQ ID NO: 1916 - DNA, 22 bp, synthetic construct
  misc_feature 1..22: note = Synthetic
  source 1..22: mol_type = other DNA
atgtagttccctccaacgagaa

SEQ ID NO: 1917 - DNA, 22 bp, synthetic construct
  misc_feature 1..22: note = Synthetic
  source 1..22: mol_type = other DNA
cctccaacgagaattaaatgtc

SEQ ID NO: 1918 - DNA, 22 bp, synthetic construct
  misc_feature 1..22: note = Synthetic
  source 1..22: mol_type = other DNA
aattaaatgtctcaagttcctc

SEQ ID NO: 1919 - DNA, 22 bp, synthetic construct
  misc_feature 1..22: note = Synthetic
  source 1..22: mol_type = other DNA
catccatgactccgccatctgt

SEQ ID NO: 1920 - DNA, 22 bp, synthetic construct
  misc_feature 1..22: note = Synthetic
  source 1..22: mol_type = other DNA
tccgccatctgttagggtctgt

SEQ ID NO: 1921 - DNA, 22 bp, synthetic construct
  misc_feature 1..22: note = Synthetic
  source 1..22: mol_type = other DNA
ctgttagggtctgtgccaatat

SEQ ID NO: 1922 - DNA, 22 bp, synthetic construct
  misc_feature 1..22: note = Synthetic
  source 1..22: mol_type = other DNA
agggtctgtgccaatatgcgaa

SEQ ID NO: 1923 - DNA, 22 bp, synthetic construct
  misc_feature 1..22: note = Synthetic
  source 1..22: mol_type = other DNA
tgtgccaatatgcgaatctgat

SEQ ID NO: 1924 - DNA, 22 bp, synthetic construct
  misc_feature 1..22: note = Synthetic
  source 1..22: mol_type = other DNA
cgaatctgatttgggttatcct

SEQ ID NO: 1925 - DNA, 22 bp, synthetic construct
  misc_feature 1..22: note = Synthetic
  source 1..22: mol_type = other DNA
gggttatcctctgaatgtcgca

SEQ ID NO: 1926 - DNA, 22 bp, synthetic construct
  misc_feature 1..22: note = Synthetic
  source 1..22: mol_type = other DNA
ctctgaatgtcgcatcaaattt

SEQ ID NO: 1927 - DNA, 22 bp, synthetic construct
  misc_feature 1..22: note = Synthetic
  source 1..22: mol_type = other DNA
ctcgttggagggaactacatga

SEQ ID NO: 1928 - DNA, 22 bp, synthetic construct
  misc_feature 1..22: note = Synthetic
  source 1..22: mol_type = other DNA
aatcaatgaggaacttgagaca

SEQ ID NO: 1929 - DNA, 22 bp, synthetic construct
  misc_feature 1..22: note = Synthetic
  source 1..22: mol_type = other DNA
tggcggagtcatggatgagcta

SEQ ID NO: 1930 - DNA, 22 bp, synthetic construct
  misc_feature 1..22: note = Synthetic
  source 1..22: mol_type = other DNA
cagatggcggagtcatggatga

SEQ ID NO: 1931 - DNA, 22 bp, synthetic construct
  misc_feature 1..22: note = Synthetic
  source 1..22: mol_type = other DNA
gaccctaacagatggcggagtc

SEQ ID NO: 1932 - DNA, 22 bp, synthetic construct
  misc_feature 1..22: note = Synthetic
  source 1..22: mol_type = other DNA
tggcacagaccctaacagatgg

SEQ ID NO: 1933 - DNA, 22 bp, synthetic construct
  misc_feature 1..22: note = Synthetic
  source 1..22: mol_type = other DNA
tcgcatattggcacagacccta

SEQ ID NO: 1934 - DNA, 22 bp, synthetic construct
  misc_feature 1..22: note = Synthetic
  source 1..22: mol_type = other DNA
gacattcagaggataacccaaa

SEQ ID NO: 1935 - DNA, 22 bp, synthetic construct
  misc_feature 1..22: note = Synthetic
  source 1..22: mol_type = other DNA
gatgcgacattcagaggataac

SEQ ID NO: 1936 - DNA, 22 bp, synthetic construct
  misc_feature 1..22: note = Synthetic
  source 1..22: mol_type = other DNA
tgaaaatttgatgcgacattca

SEQ ID NO: 1937 - DNA, 22 bp, synthetic construct
  misc_feature 1..22: note = Synthetic
  source 1..22: mol_type = other DNA
atgtgtttcagtcacttgaaaa

SEQ ID NO: 1938 - DNA, 22 bp, synthetic construct
  misc_feature 1..22: note = Synthetic
  source 1..22: mol_type = other DNA
tgcaaatgtgtttcagtcactt

SEQ ID NO: 1939 - DNA, 22 bp, synthetic construct
  misc_feature 1..22: note = Synthetic
  source 1..22: mol_type = other DNA
tttgagctgcgtccaccttgtc

SEQ ID NO: 1940 - DNA, 22 bp, synthetic construct
  misc_feature 1..22: note = Synthetic
  source 1..22: mol_type = other DNA
caatataagctgccaactgctt

SEQ ID NO: 1941 - DNA, 22 bp, synthetic construct
  misc_feature 1..22: note = Synthetic
  source 1..22: mol_type = other DNA
ataagctgccaactgcttgtca

SEQ ID NO: 1942 - DNA, 22 bp, synthetic construct
  misc_feature 1..22: note = Synthetic
  source 1..22: mol_type = other DNA
tgtcaatgaatgtgagggactc

SEQ ID NO: 1943 - DNA, 22 bp, synthetic construct
  misc_feature 1..22: note = Synthetic
  source 1..22: mol_type = other DNA
atgaatgtgagggactcctgga

SEQ ID NO: 1944 - DNA, 22 bp, synthetic construct
  misc_feature 1..22: note = Synthetic
  source 1..22: mol_type = other DNA
gagggactcctggattaagtgt

SEQ ID NO: 1945 - DNA, 22 bp, synthetic construct
  misc_feature 1..22: note = Synthetic
  source 1..22: mol_type = other DNA
cctggattaagtgtaaggattt

SEQ ID NO: 1946 - DNA, 22 bp, synthetic construct
  misc_feature 1..22: note = Synthetic
  source 1..22: mol_type = other DNA
atttttcagtctcctgggcaga

SEQ ID NO: 1947 - DNA, 22 bp, synthetic construct
  misc_feature 1..22: note = Synthetic
  source 1..22: mol_type = other DNA
tcaaatgcctcaggaagcccag

SEQ ID NO: 1948 - DNA, 22 bp, synthetic construct
  misc_feature 1..22: note = Synthetic
  source 1..22: mol_type = other DNA
ttgcagacaaggtggacgcagc

SEQ ID NO: 1949 - DNA, 22 bp, synthetic construct
  misc_feature 1..22: note = Synthetic
  source 1..22: mol_type = other DNA
agttggcagcttatattgcaga

SEQ ID NO: 1950 - DNA, 22 bp, synthetic construct
  misc_feature 1..22: note = Synthetic
  source 1..22: mol_type = other DNA
gagtccctcacattcattgaca

SEQ ID NO: 1951 - DNA, 22 bp, synthetic construct
  misc_feature 1..22: note = Synthetic
  source 1..22: mol_type = other DNA
gaaaaatccttacacttaatcc

SEQ ID NO: 1952 - DNA, 22 bp, synthetic construct
  misc_feature 1..22: note = Synthetic
  source 1..22: mol_type = other DNA
aggagactgaaaaatccttaca

SEQ ID NO: 1953 - DNA, 22 bp, synthetic construct
  misc_feature 1..22: note = Synthetic
  source 1..22: mol_type = other DNA
atccagtctgcccaggagactg

SEQ ID NO: 1954 - DNA, 22 bp, synthetic construct
  misc_feature 1..22: note = Synthetic
  source 1..22: mol_type = other DNA
caaaagttgcttgaacagagca

SEQ ID NO: 1955 - DNA, 22 bp, synthetic construct
  misc_feature 1..22: note = Synthetic
  source 1..22: mol_type = other DNA
tctttttaggctgtaaggaggc

SEQ ID NO: 1956 - DNA, 22 bp, synthetic construct
  misc_feature 1..22: note = Synthetic
  source 1..22: mol_type = other DNA
aaataacatatacctgtgcaac

SEQ ID NO: 1957 - DNA, 22 bp, synthetic construct
  misc_feature 1..22: note = Synthetic
  source 1..22: mol_type = other DNA
actctttgggcagcctccttcc

SEQ ID NO: 1958 - DNA, 22 bp, synthetic construct
  misc_feature 1..22: note = Synthetic
  source 1..22: mol_type = other DNA
tatgtttcttcatttcttctaa

SEQ ID NO: 1959 - DNA, 22 bp, synthetic construct
  misc_feature 1..22: note = Synthetic
  source 1..22: mol_type = other DNA
tctaaactgatctcatgacttg

SEQ ID NO: 1960 - DNA, 22 bp, synthetic construct
  misc_feature 1..22: note = Synthetic
  source 1..22: mol_type = other DNA
actgatctcatgacttgtcaaa

SEQ ID NO: 1961 - DNA, 22 bp, synthetic construct
  misc_feature 1..22: note = Synthetic
  source 1..22: mol_type = other DNA
tctcatgacttgtcaaatcaga

SEQ ID NO: 1962 - DNA, 22 bp, synthetic construct
  misc_feature 1..22: note = Synthetic
  source 1..22: mol_type = other DNA
tcctgtctcagattgatgttgc

SEQ ID NO: 1963 - DNA, 22 bp, synthetic construct
  misc_feature 1..22: note = Synthetic
  source 1..22: mol_type = other DNA
tgcccaaagagtcctgtctcag

SEQ ID NO: 1964 - DNA, 22 bp, synthetic construct
  misc_feature 1..22: note = Synthetic
  source 1..22: mol_type = other DNA
aggctgcccaaagagtcctgtc

SEQ ID NO: 1965 - DNA, 22 bp, synthetic construct
  misc_feature 1..22: note = Synthetic
  source 1..22: mol_type = other DNA
atcaggggaaggaggctgccca

SEQ ID NO: 1966 - DNA, 22 bp, synthetic construct
  misc_feature 1..22: note = Synthetic
  source 1..22: mol_type = other DNA
cagtttagaagaaatgaagaaa

SEQ ID NO: 1967 - DNA, 22 bp, synthetic construct
  misc_feature 1..22: note = Synthetic
  source 1..22: mol_type = other DNA
caagtcatgagatcagtttaga

SEQ ID NO: 1968 - DNA, 22 bp, synthetic construct
  misc_feature 1..22: note = Synthetic
  source 1..22: mol_type = other DNA
atctgatttgacaagtcatgag

SEQ ID NO: 1969 - DNA, 22 bp, synthetic construct
  misc_feature 1..22: note = Synthetic
  source 1..22: mol_type = other DNA
tccaatctgatttgacaagtca

SEQ ID NO: 1970 - DNA, 22 bp, synthetic construct
  misc_feature 1..22: note = Synthetic
  source 1..22: mol_type = other DNA
acagaaaatccaatctgatttg

SEQ ID NO: 1971 - DNA, 22 bp, synthetic construct
  misc_feature 1..22: note = Synthetic
  source 1..22: mol_type = other DNA
atcctcccaacagaaaatccaa

SEQ ID NO: 1972 - DNA, 22 bp, synthetic construct
  misc_feature 1..22: note = Synthetic
  source 1..22: mol_type = other DNA
atgctatcctcccaacagaaaa

SEQ ID NO: 1973 - DNA, 22 bp, synthetic construct
  misc_feature 1..22: note = Synthetic
  source 1..22: mol_type = other DNA
ccaccagaaatacataccacac

SEQ ID NO: 1974 - DNA, 22 bp, synthetic construct
  misc_feature 1..22: note = Synthetic
  source 1..22: mol_type = other DNA
ttcctgttccacactctttgtt

SEQ ID NO: 1975 - DNA, 22 bp, synthetic construct
  misc_feature 1..22: note = Synthetic
  source 1..22: mol_type = other DNA
acactctttgtttccaatgcag

SEQ ID NO: 1976 - DNA, 22 bp, synthetic construct
  misc_feature 1..22: note = Synthetic
  source 1..22: mol_type = other DNA
gcaagtgcatcttcacttcatc

SEQ ID NO: 1977 - DNA, 22 bp, synthetic construct
  misc_feature 1..22: note = Synthetic
  source 1..22: mol_type = other DNA
ttactttcttgtagacgctgct

SEQ ID NO: 1978 - DNA, 22 bp, synthetic construct
  misc_feature 1..22: note = Synthetic
  source 1..22: mol_type = other DNA
ttgtagacgctgctcaaaattg

SEQ ID NO: 1979 - DNA, 22 bp, synthetic construct
  misc_feature 1..22: note = Synthetic
  source 1..22: mol_type = other DNA
ctgctcaaaattggctggtttc

SEQ ID NO: 1980 - DNA, 22 bp, synthetic construct
  misc_feature 1..22: note = Synthetic
  source 1..22: mol_type = other DNA
ctcaaaattggctggtttctgg

SEQ ID NO: 1981 - DNA, 22 bp, synthetic construct
  misc_feature 1..22: note = Synthetic
  source 1..22: mol_type = other DNA
tcgaaacttcatggagacatct

SEQ ID NO: 1982 - DNA, 22 bp, synthetic construct
  misc_feature 1..22: note = Synthetic
  source 1..22: mol_type = other DNA
tacagtcacagctaaatcattg

SEQ ID NO: 1983 - DNA, 22 bp, synthetic construct
  misc_feature 1..22: note = Synthetic
  source 1..22: mol_type = other DNA
acaggaagtagtacagtcacag

SEQ ID NO: 1984 - DNA, 22 bp, synthetic construct
  misc_feature 1..22: note = Synthetic
  source 1..22: mol_type = other DNA
aagagtgtggaacaggaagtag

SEQ ID NO: 1985 - DNA, 22 bp, synthetic construct
  misc_feature 1..22: note = Synthetic
  source 1..22: mol_type = other DNA
aaacaaagagtgtggaacagga

SEQ ID NO: 1986 - DNA, 22 bp, synthetic construct
  misc_feature 1..22: note = Synthetic
  source 1..22: mol_type = other DNA
tggaaacaaagagtgtggaaca

SEQ ID NO: 1987 - DNA, 22 bp, synthetic construct
  misc_feature 1..22: note = Synthetic
  source 1..22: mol_type = other DNA
gcacttgcctgcattggaaaca

SEQ ID NO: 1988 - DNA, 22 bp, synthetic construct
  misc_feature 1..22: note = Synthetic
  source 1..22: mol_type = other DNA
gtaagatgattttagatgaagt

SEQ ID NO: 1989 - DNA, 22 bp, synthetic construct
  misc_feature 1..22: note = Synthetic
  source 1..22: mol_type = other DNA
aagaaagtaagatgattttaga

SEQ ID NO: 1990 - DNA, 22 bp, synthetic construct
  misc_feature 1..22: note = Synthetic
  source 1..22: mol_type = other DNA
tctacaagaaagtaagatgatt

SEQ ID NO: 1991 - DNA, 22 bp, synthetic construct
  misc_feature 1..22: note = Synthetic
  source 1..22: mol_type = other DNA
agcagcgtctacaagaaagtaa

SEQ ID NO: 1992 - DNA, 22 bp, synthetic construct
  misc_feature 1..22: note = Synthetic
  source 1..22: mol_type = other DNA
ttgagcagcgtctacaagaaag

SEQ ID NO: 1993 - DNA, 22 bp, synthetic construct
  misc_feature 1..22: note = Synthetic
  source 1..22: mol_type = other DNA
caattttgagcagcgtctacaa

SEQ ID NO: 1994 - DNA, 22 bp, synthetic construct
  misc_feature 1..22: note = Synthetic
  source 1..22: mol_type = other DNA
gtttcgattattccagaaacca

SEQ ID NO: 1995 - DNA, 22 bp, synthetic construct
  misc_feature 1..22: note = Synthetic
  source 1..22: mol_type = other DNA
ttacaagatgtctccatgaagt

SEQ ID NO: 1996 - DNA, 22 bp, synthetic construct
  misc_feature 1..22: note = Synthetic
  source 1..22: mol_type = other DNA
aaaaaattacaagatgtctcca

SEQ ID NO: 1997 - DNA, 22 bp, synthetic construct
  misc_feature 1..22: note = Synthetic
  source 1..22: mol_type = other DNA
actgtccttacagaaaaaatta

SEQ ID NO: 1998 - DNA, 22 bp, synthetic construct
  misc_feature 1..22: note = Synthetic
  source 1..22: mol_type = other DNA
cacacctttgctcccagctcat

SEQ ID NO: 1999 - DNA, 22 bp, synthetic construct
  misc_feature 1..22: note = Synthetic
  source 1..22: mol_type = other DNA
ctttgctcccagctcattataa

SEQ ID NO: 2000 - DNA, 22 bp, synthetic construct
  misc_feature 1..22: note = Synthetic
  source 1..22: mol_type = other DNA
tttcaaagctgttactctttca

SEQ ID NO: 2001 - DNA, 22 bp, synthetic construct
  misc_feature 1..22: note = Synthetic
  source 1..22: mol_type = other DNA
gttactctttcatcaagttctt

SEQ ID NO: 2002 - DNA, 22 bp, synthetic construct
  misc_feature 1..22: note = Synthetic
  source 1..22: mol_type = other DNA
gattttccgtctgctttttctg

SEQ ID NO: 2003 - DNA, 22 bp, synthetic construct
  misc_feature 1..22: note = Synthetic
  source 1..22: mol_type = other DNA
gctttttctgtacaatctgacg

SEQ ID NO: 2004 - DNA, 22 bp, synthetic construct
  misc_feature 1..22: note = Synthetic
  source 1..22: mol_type = other DNA
ttcacttcactcagacttttat

SEQ ID NO: 2005 - DNA, 22 bp, synthetic construct
  misc_feature 1..22: note = Synthetic
  source 1..22: mol_type = other DNA
cactcagacttttatacaagtt

SEQ ID NO: 2006 - DNA, 22 bp, synthetic construct
  misc_feature 1..22: note = Synthetic
  source 1..22: mol_type = other DNA
tgcattataatgagctgggagc

SEQ ID NO: 2007 - DNA, 22 bp, synthetic construct
  misc_feature 1..22: note = Synthetic
  source 1..22: mol_type = other DNA
agtaacagctttgaaattgcat

SEQ ID NO: 2008 - DNA, 22 bp, synthetic construct
  misc_feature 1..22: note = Synthetic
  source 1..22: mol_type = other DNA
cttgatgaaagagtaacagctt

SEQ ID NO: 2009 - DNA, 22 bp, synthetic construct
  misc_feature 1..22: note = Synthetic
  source 1..22: mol_type = other DNA
aaaatcccaaagaacttgatga

SEQ ID NO: 2010 - DNA, 22 bp, synthetic construct
  misc_feature 1..22: note = Synthetic
  source 1..22: mol_type = other DNA
gcagacggaaaatcccaaagaa

SEQ ID NO: 2011 - DNA, 22 bp, synthetic construct
  misc_feature 1..22: note = Synthetic
  source 1..22: mol_type = other DNA
gattgtacagaaaaagcagacg

SEQ ID NO: 2012 - DNA, 22 bp, synthetic construct
  misc_feature 1..22: note = Synthetic
  source 1..22: mol_type = other DNA
aaatggtgataaagactggacg

SEQ ID NO: 2013 - DNA, 22 bp, synthetic construct
  misc_feature 1..22: note = Synthetic
  source 1..22: mol_type = other DNA
aagtgaagtctgaagtggaaat

SEQ ID NO: 2014 - DNA, 22 bp, synthetic construct
  misc_feature 1..22: note = Synthetic
  source 1..22: mol_type = other DNA
gtgaagtgaagtctgaagtgga

SEQ ID NO: 2015 - DNA, 22 bp, synthetic construct
  misc_feature 1..22: note = Synthetic
  source 1..22: mol_type = other DNA
tgagtgaagtgaagtctgaagt

SEQ ID NO: 2016 - DNA, 22 bp, synthetic construct
  misc_feature 1..22: note = Synthetic
  source 1..22: mol_type = other DNA
aaagtctgagtgaagtgaagtc

SEQ ID NO: 2017 - DNA, 22 bp, synthetic construct
  misc_feature 1..22: note = Synthetic
  source 1..22: mol_type = other DNA
ttgtataaaagtctgagtgaag

SEQ ID NO: 2018 - DNA, 22 bp, synthetic construct
  misc_feature 1..22: note = Synthetic
  source 1..22: mol_type = other DNA
agaacttgtataaaagtctgag

SEQ ID NO: 2019 - DNA, 22 bp, synthetic construct
  misc_feature 1..22: note = Synthetic
  source 1..22: mol_type = other DNA
aacttagaacttgtataaaagt

SEQ ID NO: 2020 - DNA, 22 bp, synthetic construct
  misc_feature 1..22: note = Synthetic
  source 1..22: mol_type = other DNA
tgtttaaacttagaacttgtat

SEQ ID NO: 2021 - DNA, 22 bp, synthetic construct
  misc_feature 1..22: note = Synthetic
  source 1..22: mol_type = other DNA
tttacctttccccaggcaactt

SEQ ID NO: 2022 - DNA, 22 bp, synthetic construct
  misc_feature 1..22: note = Synthetic
  source 1..22: mol_type = other DNA
tttccccaggcaacttcagaat

SEQ ID NO: 2023 - DNA, 22 bp, synthetic construct
  misc_feature 1..22: note = Synthetic
  source 1..22: mol_type = other DNA
attactaggcattccttcaact

SEQ ID NO: 2024 - DNA, 22 bp, synthetic construct
  misc_feature 1..22: note = Synthetic
  source 1..22: mol_type = other DNA
tccttcaactgctgatctcttt

SEQ ID NO: 2025 - DNA, 22 bp, synthetic construct
  misc_feature 1..22: note = Synthetic
  source 1..22: mol_type = other DNA
catttcctttcgcatcttacgg

SEQ ID NO: 2026 - DNA, 22 bp, synthetic construct
  misc_feature 1..22: note = Synthetic
  source 1..22: mol_type = other DNA
tggattctgaagttgcctgggg

SEQ ID NO: 2027 - DNA, 22 bp, synthetic construct
  misc_feature 1..22: note = Synthetic
  source 1..22: mol_type = other DNA
gaatgcctagtaatttggattc

SEQ ID NO: 2028 - DNA, 22 bp, synthetic construct
  misc_feature 1..22: note = Synthetic
  source 1..22: mol_type = other DNA
agttgaaggaatgcctagtaat

SEQ ID NO: 2029 - DNA, 22 bp, synthetic construct
  misc_feature 1..22: note = Synthetic
  source 1..22: mol_type = other DNA
atcagcagttgaaggaatgcct

SEQ ID NO: 2030 - DNA, 22 bp, synthetic construct
  misc_feature 1..22: note = Synthetic
  source 1..22: mol_type = other DNA
gagatcagcagttgaaggaatg

SEQ ID NO: 2031 - DNA, 22 bp, synthetic construct
  misc_feature 1..22: note = Synthetic
  source 1..22: mol_type = other DNA
tgacaaagagatcagcagttga

SEQ ID NO: 2032 - DNA, 22 bp, synthetic construct
  misc_feature 1..22: note = Synthetic
  source 1..22: mol_type = other DNA
atatggaattgacaaagagatc

SEQ ID NO: 2033 - DNA, 22 bp, synthetic construct
  misc_feature 1..22: note = Synthetic
  source 1..22: mol_type = other DNA
gctacagatatggaattgacaa

SEQ ID NO: 2034 - DNA, 22 bp, synthetic construct
  misc_feature 1..22: note = Synthetic
  source 1..22: mol_type = other DNA
gaatggctggcagctacagata

SEQ ID NO: 2035 - DNA, 22 bp, synthetic construct
  misc_feature 1..22: note = Synthetic
  source 1..22: mol_type = other DNA
cttgacagaatggctggcagct

SEQ ID NO: 2036 - DNA, 22 bp, synthetic construct
  misc_feature 1..22: note = Synthetic
  source 1..22: mol_type = other DNA
cgaaaggaaatgaatgtcttga

SEQ ID NO: 2037 - DNA, 22 bp, synthetic construct
  misc_feature 1..22: note = Synthetic
  source 1..22: mol_type = other DNA
gtcccgtaagatgcgaaaggaa

SEQ ID NO: 2038 - DNA, 22 bp, synthetic construct
  misc_feature 1..22: note = Synthetic
  source 1..22: mol_type = other DNA
aattgtcccgtaagatgcgaaa

SEQ ID NO: 2039 - DNA, 22 bp, synthetic construct
  misc_feature 1..22: note = Synthetic
  source 1..22: mol_type = other DNA
agaaatgcttgaaattgtcccg

SEQ ID NO: 2040 - DNA, 22 bp, synthetic construct
  misc_feature 1..22: note = Synthetic
  source 1..22: mol_type = other DNA
aagcaacagttggagaaatgct

SEQ ID NO: 2041 - DNA, 22 bp, synthetic construct
  misc_feature 1..22: note = Synthetic
  source 1..22: mol_type = other DNA
acagaaagaaagcaacagttgg

SEQ ID NO: 2042 - DNA, 22 bp, synthetic construct
  misc_feature 1..22: note = Synthetic
  source 1..22: mol_type = other DNA
tttcaggtaacagaaagaaagc

SEQ ID NO: 2043 - DNA, 22 bp, synthetic construct
  misc_feature 1..22: note = Synthetic
  source 1..22: mol_type = other DNA
ctagccttttctcttaccaaca

SEQ ID NO: 2044 - DNA, 22 bp, synthetic construct
  misc_feature 1..22: note = Synthetic
  source 1..22: mol_type = other DNA
gatttaaccactcttctgctcg

SEQ ID NO: 2045 - DNA, 22 bp, synthetic construct
  misc_feature 1..22: note = Synthetic
  source 1..22: mol_type = other DNA
tctgctcgggaggtgacagcta

SEQ ID NO: 2046 - DNA, 22 bp, synthetic construct
  misc_feature 1..22: note = Synthetic
  source 1..22: mol_type = other DNA
tatccagttactattcagaaga

SEQ ID NO: 2047 - DNA, 22 bp, synthetic construct
  misc_feature 1..22: note = Synthetic
  source 1..22: mol_type = other DNA
ttttcaaggcctctcctacctc

SEQ ID NO: 2048 - DNA, 22 bp, synthetic construct
  misc_feature 1..22: note = Synthetic
  source 1..22: mol_type = other DNA
tctcctacctctgtgatactct

SEQ ID NO: 2049 - DNA, 22 bp, synthetic construct
  misc_feature 1..22: note = Synthetic
  source 1..22: mol_type = other DNA
tcttcaggtgcaccttctgttt

SEQ ID NO: 2050 - DNA, 22 bp, synthetic construct
  misc_feature 1..22: note = Synthetic
  source 1..22: mol_type = other DNA
ccttctgtttctcaatctcttt

SEQ ID NO: 2051 - DNA, 22 bp, synthetic construct
  misc_feature 1..22: note = Synthetic
  source 1..22: mol_type = other DNA
cagaagagtggttaaatctttt

SEQ ID NO: 2052 - DNA, 22 bp, synthetic construct
  misc_feature 1..22: note = Synthetic
  source 1..22: mol_type = other DNA
cacctcccgagcagaagagtgg

SEQ ID NO: 2053 - DNA, 22 bp, synthetic construct
  misc_feature 1..22: note = Synthetic
  source 1..22: mol_type = other DNA
gctgtcacctcccgagcagaag

SEQ ID NO: 2054 - DNA, 22 bp, synthetic construct
  misc_feature 1..22: note = Synthetic
  source 1..22: mol_type = other DNA
atagctgtcacctcccgagcag

SEQ ID NO: 2055 - DNA, 22 bp, synthetic construct
  misc_feature 1..22: note = Synthetic
  source 1..22: mol_type = other DNA
aactcagtcttctgaatagtaa

SEQ ID NO: 2056 - DNA, 22 bp, synthetic construct
  misc_feature 1..22: note = Synthetic
  source 1..22: mol_type = other DNA
ggaagataaactcagtcttctg

SEQ ID NO: 2057 - DNA, 22 bp, synthetic construct
  misc_feature 1..22: note = Synthetic
  source 1..22: mol_type = other DNA
ggtggaagataaactcagtctt

SEQ ID NO: 2058 - DNA, 22 bp, synthetic construct
  misc_feature 1..22: note = Synthetic
  source 1..22: mol_type = other DNA
ggagacgttggtggaagataaa

SEQ ID NO: 2059 - DNA, 22 bp, synthetic construct
  misc_feature 1..22: note = Synthetic
  source 1..22: mol_type = other DNA
gggcaagaaggagacgttggtg

SEQ ID NO: 2060 - DNA, 22 bp, synthetic construct
  misc_feature 1..22: note = Synthetic
  source 1..22: mol_type = other DNA
cagttttgggcaagaaggagac

SEQ ID NO: 2061 - DNA, 22 bp, synthetic construct
  misc_feature 1..22: note = Synthetic
  source 1..22: mol_type = other DNA
cagaggtaggagaggccttgaa

SEQ ID NO: 2062 - DNA, 22 bp, synthetic construct
  misc_feature 1..22: note = Synthetic
  source 1..22: mol_type = other DNA
aggtgcacctgaagagtatcac

SEQ ID NO: 2063 - DNA, 22 bp, synthetic construct
  misc_feature 1..22: note = Synthetic
  source 1..22: mol_type = other DNA
tgagaaacagaaggtgcacctg

SEQ ID NO: 2064 - DNA, 22 bp, synthetic construct
  misc_feature 1..22: note = Synthetic
  source 1..22: mol_type = other DNA
ctcaaaaagagattgagaaaca

SEQ ID NO: 2065 - DNA, 22 bp, synthetic construct
  misc_feature 1..22: note = Synthetic
  source 1..22: mol_type = other DNA
ccttttcacaggctactcaaaa

SEQ ID NO: 2066 - DNA, 22 bp, synthetic construct
  misc_feature 1..22: note = Synthetic
  source 1..22: mol_type = other DNA
cttaagcacgtcttctttttgc

SEQ ID NO: 2067 - DNA, 22 bp, synthetic construct
  misc_feature 1..22: note = Synthetic
  source 1..22: mol_type = other DNA
tttttgctggggtttctttttc

SEQ ID NO: 2068 - DNA, 22 bp, synthetic construct
  misc_feature 1..22: note = Synthetic
  source 1..22: mol_type = other DNA
tttctttttctctgattcatcc

SEQ ID NO: 2069 - DNA, 22 bp, synthetic construct
  misc_feature 1..22: note = Synthetic
  source 1..22: mol_type = other DNA
attcatccaaaagtgtgtcagc

SEQ ID NO: 2070 - DNA, 22 bp, synthetic construct
  misc_feature 1..22: note = Synthetic
  source 1..22: mol_type = other DNA
catccaaaagtgtgtcagcctg

SEQ ID NO: 2071 - DNA, 22 bp, synthetic construct
  misc_feature 1..22: note = Synthetic
  source 1..22: mol_type = other DNA
tgtcagcctgaatgatccactt

SEQ ID NO: 2072 - DNA, 22 bp, synthetic construct
  misc_feature 1..22: note = Synthetic
  source 1..22: mol_type = other DNA
gcctgaatgatccactttgtga

SEQ ID NO: 2073 - DNA, 22 bp, synthetic construct
  misc_feature 1..22: note = Synthetic
  source 1..22: mol_type = other DNA
cactttgtgatgtggtccacat

SEQ ID NO: 2074 - DNA, 22 bp, synthetic construct
  misc_feature 1..22: note = Synthetic
  source 1..22: mol_type = other DNA
tgatgtggtccacattctggtc

SEQ ID NO: 2075 - DNA, 22 bp, synthetic construct
  misc_feature 1..22: note = Synthetic
  source 1..22: mol_type = other DNA
tggtcaaaagtttccatgtgtt

SEQ ID NO: 2076 - DNA, 22 bp, synthetic construct
  misc_feature 1..22: note = Synthetic
  source 1..22: mol_type = other DNA
tttccatgtgtttctggtattc

SEQ ID NO: 2077 - DNA, 22 bp, synthetic construct
  misc_feature 1..22: note = Synthetic
  source 1..22: mol_type = other DNA
aaaagaagacgtgcttaaggta

SEQ ID NO: 2078 - DNA, 22 bp, synthetic construct
  misc_feature 1..22: note = Synthetic
  source 1..22: mol_type = other DNA
cccagcaaaaagaagacgtgct

SEQ ID NO: 2079 - DNA, 22 bp, synthetic construct
  misc_feature 1..22: note = Synthetic
  source 1..22: mol_type = other DNA
attcaggctgacacacttttgg

SEQ ID NO: 2080 - DNA, 22 bp, synthetic construct
  misc_feature 1..22: note = Synthetic
  source 1..22: mol_type = other DNA
gatcattcaggctgacacactt

SEQ ID NO: 2081 - DNA, 22 bp, synthetic construct
  misc_feature 1..22: note = Synthetic
  source 1..22: mol_type = other DNA
agaatgtggaccacatcacaaa

SEQ ID NO: 2082 - DNA, 22 bp, synthetic construct
  misc_feature 1..22: note = Synthetic
  source 1..22: mol_type = other DNA
gaccagaatgtggaccacatca

SEQ ID NO: 2083 - DNA, 22 bp, synthetic construct
  misc_feature 1..22: note = Synthetic
  source 1..22: mol_type = other DNA
gaaacacatggaaacttttgac

SEQ ID NO: 2084 - DNA, 22 bp, synthetic construct
  misc_feature 1..22: note = Synthetic
  source 1..22: mol_type = other DNA
ttggagtagatcttcctacctt

SEQ ID NO: 2085 - DNA, 22 bp, synthetic construct
  misc_feature 1..22: note = Synthetic
  source 1..22: mol_type = other DNA
tagatcttcctacctttccagt

SEQ ID NO: 2086 - DNA, 22 bp, synthetic construct
  misc_feature 1..22: note = Synthetic
  source 1..22: mol_type = other DNA
cctttccagtcttaattctgtg

SEQ ID NO: 2087 - DNA, 22 bp, synthetic construct
  misc_feature 1..22: note = Synthetic
  source 1..22: mol_type = other DNA
cttaattctgtgtgaaatggct

SEQ ID NO: 2088 - DNA, 22 bp, synthetic construct
  misc_feature 1..22: note = Synthetic
  source 1..22: mol_type = other DNA
attctgtgtgaaatggctgcaa

SEQ ID NO: 2089 - DNA, 22 bp, synthetic construct
  misc_feature 1..22: note = Synthetic
  source 1..22: mol_type = other DNA
ctgtgtgaaatggctgcaaatc

SEQ ID NO: 2090 - DNA, 22 bp, synthetic construct
  misc_feature 1..22: note = Synthetic
  source 1..22: mol_type = other DNA
ctgcaaatcgatggttgagctc

SEQ ID NO: 2091 - DNA, 22 bp, synthetic construct
  misc_feature 1..22: note = Synthetic
  source 1..22: mol_type = other DNA
gagctctgagatttggggctct

SEQ ID NO: 2092 - DNA, 22 bp, synthetic construct
  misc_feature 1..22: note = Synthetic
  source 1..22: mol_type = other DNA
atttggggctctactaatttcc

SEQ ID NO: 2093 - DNA, 22 bp, synthetic construct
  misc_feature 1..22: note = Synthetic
  source 1..22: mol_type = other DNA
tggggctctactaatttcctgc

SEQ ID NO: 2094 - DNA, 22 bp, synthetic construct
  misc_feature 1..22: note = Synthetic
  source 1..22: mol_type = other DNA
actaatttcctgcagtggtcac

SEQ ID NO: 2095 - DNA, 22 bp, synthetic construct
  misc_feature 1..22: note = Synthetic
  source 1..22: mol_type = other DNA
cagtggtcaccgcggtttgcca

SEQ ID NO: 2096 - DNA, 22 bp, synthetic construct
  misc_feature 1..22: note = Synthetic
  source 1..22: mol_type = other DNA
cggtttgccatcaagtttgctg

SEQ ID NO: 2097 - DNA, 22 bp, synthetic construct
  misc_feature 1..22: note = Synthetic
  source 1..22: mol_type = other DNA
aagtttgctgcttggtcacgtg

SEQ ID NO: 2098 - DNA, 22 bp, synthetic construct
  misc_feature 1..22: note = Synthetic
  source 1..22: mol_type = other DNA
gtccacctttgggcgtatgtca

SEQ ID NO: 2099 - DNA, 22 bp, synthetic construct
  misc_feature 1..22: note = Synthetic
  source 1..22: mol_type = other DNA
tttcacacagaattaagactgg

SEQ ID NO: 2100 - DNA, 22 bp, synthetic construct
  misc_feature 1..22: note = Synthetic
  source 1..22: mol_type = other DNA
atcgatttgcagccatttcaca

SEQ ID NO: 2101 - DNA, 22 bp, synthetic construct
  misc_feature 1..22: note = Synthetic
  source 1..22: mol_type = other DNA
ccccaaatctcagagctcaacc

SEQ ID NO: 2102 - DNA, 22 bp, synthetic construct
  misc_feature 1..22: note = Synthetic
  source 1..22: mol_type = other DNA
actgcaggaaattagtagagcc

SEQ ID NO: 2103 - DNA, 22 bp, synthetic construct
  misc_feature 1..22: note = Synthetic
  source 1..22: mol_type = other DNA
accgcggtgaccactgcaggaa

SEQ ID NO: 2104 - DNA, 22 bp, synthetic construct
  misc_feature 1..22: note = Synthetic
  source 1..22: mol_type = other DNA
gcaaaccgcggtgaccactgca

SEQ ID NO: 2105 - DNA, 22 bp, synthetic construct
  misc_feature 1..22: note = Synthetic
  source 1..22: mol_type = other DNA
agcagcaaacttgatggcaaac

SEQ ID NO: 2106 - DNA, 22 bp, synthetic construct
  misc_feature 1..22: note = Synthetic
  source 1..22: mol_type = other DNA
ctacacgtgaccaagcagcaaa

SEQ ID NO: 2107 - DNA, 22 bp, synthetic construct
  misc_feature 1..22: note = Synthetic
  source 1..22: mol_type = other DNA
cagaactgaatgacatacgccc

SEQ ID NO: 2108 - DNA, 22 bp, synthetic construct
  misc_feature 1..22: note = Synthetic
  source 1..22: mol_type = other DNA
aatatagcgtttaaaggcagaa

SEQ ID NO: 2109 - DNA, 22 bp, synthetic construct
  misc_feature 1..22: note = Synthetic
  source 1..22: mol_type = other DNA
aaccaatttaccatatctttat

SEQ ID NO: 2110 - DNA, 22 bp, synthetic construct
  misc_feature 1..22: note = Synthetic
  source 1..22: mol_type = other DNA
tctttattgaagtcttcctctt

SEQ ID NO: 2111 - DNA, 22 bp, synthetic construct
  misc_feature 1..22: note = Synthetic
  source 1..22: mol_type = other DNA
cctctttcagattcaccccctg

SEQ ID NO: 2112 - DNA, 22 bp, synthetic construct
  misc_feature 1..22: note = Synthetic
  source 1..22: mol_type = other DNA
caccccctgctgaatttcagcc

SEQ ID NO: 2113 - DNA, 22 bp, synthetic construct
  misc_feature 1..22: note = Synthetic
  source 1..22: mol_type = other DNA
cccctgctgaatttcagcctcc

SEQ ID NO: 2114 - DNA, 22 bp, synthetic construct
  misc_feature 1..22: note = Synthetic
  source 1..22: mol_type = other DNA
aatttcagcctccagtggttca

SEQ ID NO: 2115 - DNA, 22 bp, synthetic construct
  misc_feature 1..22: note = Synthetic
  source 1..22: mol_type = other DNA
ggttcaagcaatttttgtatat

SEQ ID NO: 2116 - DNA, 22 bp, synthetic construct
  misc_feature 1..22: note = Synthetic
  source 1..22: mol_type = other DNA
ttgtatatctgagttaaactgc

SEQ ID NO: 2117 - DNA, 22 bp, synthetic construct
  misc_feature 1..22: note = Synthetic
  source 1..22: mol_type = other DNA
taaactgctccaattccttcaa

SEQ ID NO: 2118 - DNA, 22 bp, synthetic construct
  misc_feature 1..22: note = Synthetic
  source 1..22: mol_type = other DNA
ggaagacttcaataaagatatg

SEQ ID NO: 2119 - DNA, 22 bp, synthetic construct
  misc_feature 1..22: note = Synthetic
  source 1..22: mol_type = other DNA
aagaggaagacttcaataaaga

SEQ ID NO: 2120 - DNA, 22 bp, synthetic construct
  misc_feature 1..22: note = Synthetic
  source 1..22: mol_type = other DNA
tctgaaagaggaagacttcaat

SEQ ID NO: 2121 - DNA, 22 bp, synthetic construct
  misc_feature 1..22: note = Synthetic
  source 1..22: mol_type = other DNA
ggtgaatctgaaagaggaagac

SEQ ID NO: 2122 - DNA, 22 bp, synthetic construct
  misc_feature 1..22: note = Synthetic
  source 1..22: mol_type = other DNA
ggaggctgaaattcagcagggg

SEQ ID NO: 2123 - DNA, 22 bp, synthetic construct
  misc_feature 1..22: note = Synthetic
  source 1..22: mol_type = other DNA
cactggaggctgaaattcagca

SEQ ID NO: 2124 - DNA, 22 bp, synthetic construct
  misc_feature 1..22: note = Synthetic
  source 1..22: mol_type = other DNA
aattgcttgaaccactggaggc

SEQ ID NO: 2125 - DNA, 22 bp, synthetic construct
  misc_feature 1..22: note = Synthetic
  source 1..22: mol_type = other DNA
gagcagtttaactcagatatac

SEQ ID NO: 2126 - DNA, 22 bp, synthetic construct
  misc_feature 1..22: note = Synthetic
  source 1..22: mol_type = other DNA
gaaggaattggagcagtttaac

SEQ ID NO: 2127 - DNA, 22 bp, synthetic construct
  misc_feature 1..22: note = Synthetic
  source 1..22: mol_type = other DNA
tccattcctttgaaggaattgg

SEQ ID NO: 2128 - DNA, 22 bp, synthetic construct
  misc_feature 1..22: note = Synthetic
  source 1..22: mol_type = other DNA
ttttaggcctccattcctttga

SEQ ID NO: 2129 - DNA, 22 bp, synthetic construct
  misc_feature 1..22: note = Synthetic
  source 1..22: mol_type = other DNA
tttcctctcgctttctctcatc

SEQ ID NO: 2130 - DNA, 22 bp, synthetic construct
  misc_feature 1..22: note = Synthetic
  source 1..22: mol_type = other DNA
ctctcatctgtgattctttgtt

SEQ ID NO: 2131 - DNA, 22 bp, synthetic construct
  misc_feature 1..22: note = Synthetic
  source 1..22: mol_type = other DNA
ttgtaagttgtctcctctttgc

SEQ ID NO: 2132 - DNA, 22 bp, synthetic construct
  misc_feature 1..22: note = Synthetic
  source 1..22: mol_type = other DNA
ctcctctttgcaacaattcttt

SEQ ID NO: 2133 - DNA, 22 bp, synthetic construct
  misc_feature 1..22: note = Synthetic
  source 1..22: mol_type = other DNA
acagtaccctcattgtcttcat

SEQ ID NO: 2134 - DNA, 22 bp, synthetic construct
  misc_feature 1..22: note = Synthetic
  source 1..22: mol_type = other DNA
tacagacaaaacataatgctct

SEQ ID NO: 2135 - DNA, 22 bp, synthetic construct
  misc_feature 1..22: note = Synthetic
  source 1..22: mol_type = other DNA
acagcagctgttacagacaaaa

SEQ ID NO: 2136 - DNA, 22 bp, synthetic construct
  misc_feature 1..22: note = Synthetic
  source 1..22: mol_type = other DNA
atgagagaaagcgagaggaaat

SEQ ID NO: 2137 - DNA, 22 bp, synthetic construct
  misc_feature 1..22: note = Synthetic
  source 1..22: mol_type = other DNA
tcacagatgagagaaagcgaga

SEQ ID NO: 2138 - DNA, 22 bp, synthetic construct
  misc_feature 1..22: note = Synthetic
  source 1..22: mol_type = other DNA
agacaacttacaacaaagaatc

SEQ ID NO: 2139 - DNA, 22 bp, synthetic construct
  misc_feature 1..22: note = Synthetic
  source 1..22: mol_type = other DNA
aaagaggagacaacttacaaca

SEQ ID NO: 2140 - DNA, 22 bp, synthetic construct
  misc_feature 1..22: note = Synthetic
  source 1..22: mol_type = other DNA
gaagacaatgagggtactgtaa

SEQ ID NO: 2141 - DNA, 22 bp, synthetic construct
  misc_feature 1..22: note = Synthetic
  source 1..22: mol_type = other DNA
ttttgatcagaatgaagacaat

SEQ ID NO: 2142 - DNA, 22 bp, synthetic construct
  misc_feature 1..22: note = Synthetic
  source 1..22: mol_type = other DNA
tgttgtttttgatcagaatgaa

SEQ ID NO: 2143 - DNA, 22 bp, synthetic construct
  misc_feature 1..22: note = Synthetic
  source 1..22: mol_type = other DNA
tattttcctttcatctctgggc

SEQ ID NO: 2144 - DNA, 22 bp, synthetic construct
  misc_feature 1..22: note = Synthetic
  source 1..22: mol_type = other DNA
atctctgggctcaggtaggctg

SEQ ID NO: 2145 - DNA, 22 bp, synthetic construct
  misc_feature 1..22: note = Synthetic
  source 1..22: mol_type = other DNA
caggtaggctggctaatttttt

SEQ ID NO: 2146 - DNA, 22 bp, synthetic construct
  misc_feature 1..22: note = Synthetic
  source 1..22: mol_type = other DNA
tcaatgtcatccaagcatttca

SEQ ID NO: 2147 - DNA, 22 bp, synthetic construct
  misc_feature 1..22: note = Synthetic
  source 1..22: mol_type = other DNA
agatcatcagcctgcctcttgt

SEQ ID NO: 2148 - DNA, 22 bp, synthetic construct
  misc_feature 1..22: note = Synthetic
  source 1..22: mol_type = other DNA
gcctgcctcttgtactgatacc

SEQ ID NO: 2149 - DNA, 22 bp, synthetic construct
  misc_feature 1..22: note = Synthetic
  source 1..22: mol_type = other DNA
tcttgtactgataccactgatg

SEQ ID NO: 2150 - DNA, 22 bp, synthetic construct
  misc_feature 1..22: note = Synthetic
  source 1..22: mol_type = other DNA
gccttttttcttctttgagacc

SEQ ID NO: 2151 - DNA, 22 bp, synthetic construct
  misc_feature 1..22: note = Synthetic
  source 1..22: mol_type = other DNA
ccagagatgaaaggaaaataaa

SEQ ID NO: 2152 - DNA, 22 bp, synthetic construct
  misc_feature 1..22: note = Synthetic
  source 1..22: mol_type = other DNA
agcccagagatgaaaggaaaat

SEQ ID NO: 2153 - DNA, 22 bp, synthetic construct
  misc_feature 1..22: note = Synthetic
  source 1..22: mol_type = other DNA
tacctgagcccagagatgaaag

SEQ ID NO: 2154 - DNA, 22 bp, synthetic construct
  misc_feature 1..22: note = Synthetic
  source 1..22: mol_type = other DNA
attagccagcctacctgagccc

SEQ ID NO: 2155 - DNA, 22 bp, synthetic construct
  misc_feature 1..22: note = Synthetic
  source 1..22: mol_type = other DNA
aaatgcttggatgacattgaaa

SEQ ID NO: 2156 - DNA, 22 bp, synthetic construct
  misc_feature 1..22: note = Synthetic
  source 1..22: mol_type = other DNA
ggctgatgatctcctgaaatgc

SEQ ID NO: 2157 - DNA, 22 bp, synthetic construct
  misc_feature 1..22: note = Synthetic
  source 1..22: mol_type = other DNA
aagaggcaggctgatgatctcc

SEQ ID NO: 2158 - DNA, 22 bp, synthetic construct
  misc_feature 1..22: note = Synthetic
  source 1..22: mol_type = other DNA
gtatcagtacaagaggcaggct

SEQ ID NO: 2159 - DNA, 22 bp, synthetic construct
  misc_feature 1..22: note = Synthetic
  source 1..22: mol_type = other DNA
gtggtatcagtacaagaggcag

SEQ ID NO: 2160 - DNA, 22 bp, synthetic construct
  misc_feature 1..22: note = Synthetic
  source 1..22: mol_type = other DNA
ctagaaatttctcatcagtggt

SEQ ID NO: 2161 - DNA, 22 bp, synthetic construct
  misc_feature 1..22: note = Synthetic
  source 1..22: mol_type = other DNA
aaggctctagaaatttctcatc

SEQ ID NO: 2162 - DNA, 22 bp, synthetic construct
  misc_feature 1..22: note = Synthetic
  source 1..22: mol_type = other DNA
aaaaaggctctagaaatttctc

SEQ ID NO: 2163 - DNA, 22 bp, synthetic construct
  misc_feature 1..22: note = Synthetic
  source 1..22: mol_type = other DNA
ctcaaagaagaaaaaaggctct

SEQ ID NO: 2164 - DNA, 22 bp, synthetic construct
  misc_feature 1..22: note = Synthetic
  source 1..22: mol_type = other DNA
tgtctgcaccatgaacaggatt

SEQ ID NO: 2165 - DNA, 22 bp, synthetic construct
  misc_feature 1..22: note = Synthetic
  source 1..22: mol_type = other DNA
cagtaacaactcacaatttgtg

SEQ ID NO: 2166 - DNA, 22 bp, synthetic construct
  misc_feature 1..22: note = Synthetic
  source 1..22: mol_type = other DNA
acaactcacaatttgtgcaaag

SEQ ID NO: 2167 - DNA, 22 bp, synthetic construct
  misc_feature 1..22: note = Synthetic
  source 1..22: mol_type = other DNA
aaagttgagtcttcgaaactga

SEQ ID NO: 2168 - DNA, 22 bp, synthetic construct
  misc_feature 1..22: note = Synthetic
  source 1..22: mol_type = other DNA
ttcgaaactgagcaaatttgct

SEQ ID NO: 2169 - DNA, 22 bp, synthetic construct
  misc_feature 1..22: note = Synthetic
  source 1..22: mol_type = other DNA
tttcccgccagcgcttgctgag

SEQ ID NO: 2170 - DNA, 22 bp, synthetic construct
  misc_feature 1..22: note = Synthetic
  source 1..22: mol_type = other DNA
gccagcgcttgctgagctggat

SEQ ID NO: 2171 - DNA, 22 bp, synthetic construct
  misc_feature 1..22: note = Synthetic
  source 1..22: mol_type = other DNA
attcagctcctctttcttcttc

SEQ ID NO: 2172 - DNA, 22 bp, synthetic construct
  misc_feature 1..22: note = Synthetic
  source 1..22: mol_type = other DNA
tcctctttcttcttctgcaatt

SEQ ID NO: 2173 - DNA, 22 bp, synthetic construct
  misc_feature 1..22: note = Synthetic
  source 1..22: mol_type = other DNA
ctttcttcttctgcaattcccg

SEQ ID NO: 2174 - DNA, 22 bp, synthetic construct
  misc_feature 1..22: note = Synthetic
  source 1..22: mol_type = other DNA
aagactcaactttgcacaaatt

SEQ ID NO: 2175 - DNA, 22 bp, synthetic construct
  misc_feature 1..22: note = Synthetic
  source 1..22: mol_type = other DNA
agtttcgaagactcaactttgc

SEQ ID NO: 2176 - DNA, 22 bp, synthetic construct
  misc_feature 1..22: note = Synthetic
  source 1..22: mol_type = other DNA
cgggaaattgagagcaaatttg

SEQ ID NO: 2177 - DNA, 22 bp, synthetic construct
  misc_feature 1..22: note = Synthetic
  source 1..22: mol_type = other DNA
aagcgctggcgggaaattgaga

SEQ ID NO: 2178 - DNA, 22 bp, synthetic construct
  misc_feature 1..22: note = Synthetic
  source 1..22: mol_type = other DNA
tccagctcagcaagcgctggcg

SEQ ID NO: 2179 - DNA, 22 bp, synthetic construct
  misc_feature 1..22: note = Synthetic
  source 1..22: mol_type = other DNA
ccgcaatggcagtggagccaac

SEQ ID NO: 2180 - DNA, 22 bp, synthetic construct
  misc_feature 1..22: note = Synthetic
  source 1..22: mol_type = other DNA
tgtctgaggatggggccgcaat

SEQ ID NO: 2181 - DNA, 22 bp, synthetic construct
  misc_feature 1..22: note = Synthetic
  source 1..22: mol_type = other DNA
agggcttgtctgaggatggggc

SEQ ID NO: 2182 - DNA, 22 bp, synthetic construct
  misc_feature 1..22: note = Synthetic
  source 1..22: mol_type = other DNA
taggcaagctgagggcttgtct

SEQ ID NO: 2183 - DNA, 22 bp, synthetic construct
  misc_feature 1..22: note = Synthetic
  source 1..22: mol_type = other DNA
agaagaagaaagaggagctgaa

SEQ ID NO: 2184 - DNA, 22 bp, synthetic construct
  misc_feature 1..22: note = Synthetic
  source 1..22: mol_type = other DNA
attgcagaagaagaaagaggag

SEQ ID NO: 2185 - DNA, 22 bp, synthetic construct
  misc_feature 1..22: note = Synthetic
  source 1..22: mol_type = other DNA
tttgctcaataggaaattgatc

SEQ ID NO: 2186 - DNA, 22 bp, synthetic construct
  misc_feature 1..22: note = Synthetic
  source 1..22: mol_type = other DNA
ttcagagactcctcttgcttaa

SEQ ID NO: 2187 - DNA, 22 bp, synthetic construct
  misc_feature 1..22: note = Synthetic
  source 1..22: mol_type = other DNA
tcctcttgcttaaagagatctt

SEQ ID NO: 2188 - DNA, 22 bp, synthetic construct
  misc_feature 1..22: note = Synthetic
  source 1..22: mol_type = other DNA
agatcttcaaagtccttagcac

SEQ ID NO: 2189 - DNA, 22 bp, synthetic construct
  misc_feature 1..22: note = Synthetic
  source 1..22: mol_type = other DNA
agcacagaggtcaggagcattg

SEQ ID NO: 2190 - DNA, 22 bp, synthetic construct
  misc_feature 1..22: note = Synthetic
  source 1..22: mol_type = other DNA
agcattgagaagttgttccact

SEQ ID NO: 2191 - DNA, 22 bp, synthetic construct
  misc_feature 1..22: note = Synthetic
  source 1..22: mol_type = other DNA
cttctaatagggcttgtgagac

SEQ ID NO: 2192 - DNA, 22 bp, synthetic construct
  misc_feature 1..22: note = Synthetic
  source 1..22: mol_type = other DNA
ctaatagggcttgtgagacatg

SEQ ID NO: 2193 - DNA, 22 bp, synthetic construct
  misc_feature 1..22: note = Synthetic
  source 1..22: mol_type = other DNA
gggcttgtgagacatgagtgat

SEQ ID NO: 2194 - DNA, 22 bp, synthetic construct
  misc_feature 1..22: note = Synthetic
  source 1..22: mol_type = other DNA
tgtgagacatgagtgatttcag

SEQ ID NO: 2195 - DNA, 22 bp, synthetic construct
  misc_feature 1..22: note = Synthetic
  source 1..22: mol_type = other DNA
agacatgagtgatttcagtcaa

SEQ ID NO: 2196 - DNA, 22 bp, synthetic construct
  misc_feature 1..22: note = Synthetic
  source 1..22: mol_type = other DNA
tcaaataagtagaaggcacata

SEQ ID NO: 2197 - DNA, 22 bp, synthetic construct
  misc_feature 1..22: note = Synthetic
  source 1..22: mol_type = other DNA
aagaaatttccaaaggcatgtc

SEQ ID NO: 2198 - DNA, 22 bp, synthetic construct
  misc_feature 1..22: note = Synthetic
  source 1..22: mol_type = other DNA
tcaccatcatcgtttcttcacg

SEQ ID NO: 2199 - DNA, 22 bp, synthetic construct
  misc_feature 1..22: note = Synthetic
  source 1..22: mol_type = other DNA
atcgtttcttcacggacagtgt

SEQ ID NO: 2200 - DNA, 22 bp, synthetic construct
  misc_feature 1..22: note = Synthetic
  source 1..22: mol_type = other DNA
tctttaagcaagaggagtctct

SEQ ID NO: 2201 - DNA, 22 bp, synthetic construct
  misc_feature 1..22: note = Synthetic
  source 1..22: mol_type = other DNA
tttgaagatctctttaagcaag

SEQ ID NO: 2202 - DNA, 22 bp, synthetic construct
  misc_feature 1..22: note = Synthetic
  source 1..22: mol_type = other DNA
tgacctctgtgctaaggacttt

SEQ ID NO: 2203 - DNA, 22 bp, synthetic construct
  misc_feature 1..22: note = Synthetic
  source 1..22: mol_type = other DNA
cctattagaagtggaacaactt

SEQ ID NO: 2204 - DNA, 22 bp, synthetic construct
  misc_feature 1..22: note = Synthetic
  source 1..22: mol_type = other DNA
ctcatgtctcacaagccctatt

SEQ ID NO: 2205 - DNA, 22 bp, synthetic construct
  misc_feature 1..22: note = Synthetic
  source 1..22: mol_type = other DNA
atgtgccttctacttatttgac

SEQ ID NO: 2206 - DNA, 22 bp, synthetic construct
  misc_feature 1..22: note = Synthetic
  source 1..22: mol_type = other DNA
tgatgactgaagacatgccttt

SEQ ID NO: 2207 - DNA, 22 bp, synthetic construct
  misc_feature 1..22: note = Synthetic
  source 1..22: mol_type = other DNA
ctgtccgtgaagaaacgatgat

SEQ ID NO: 2208 - DNA, 22 bp, synthetic construct
  misc_feature 1..22: note = Synthetic
  source 1..22: mol_type = other DNA
acactgtccgtgaagaaacgat

SEQ ID NO: 2209 - DNA, 22 bp, synthetic construct
  misc_feature 1..22: note = Synthetic
  source 1..22: mol_type = other DNA
agcacactgtccgtgaagaaac

SEQ ID NO: 2210 - DNA, 22 bp, synthetic construct
  misc_feature 1..22: note = Synthetic
  source 1..22: mol_type = other DNA
accagcacactgtccgtgaaga

SEQ ID NO: 2211 - DNA, 22 bp, synthetic construct
  misc_feature 1..22: note = Synthetic
  source 1..22: mol_type = other DNA
aatatatgtgttacctaccctt

SEQ ID NO: 2212 - DNA, 22 bp, synthetic construct
  misc_feature 1..22: note = Synthetic
  source 1..22: mol_type = other DNA
attttgttaactttttcccatt

SEQ ID NO: 2213 - DNA, 22 bp, synthetic construct
  misc_feature 1..22: note = Synthetic
  source 1..22: mol_type = other DNA
cctttccacaggcgttgcactt

SEQ ID NO: 2214 - DNA, 22 bp, synthetic construct
  misc_feature 1..22: note = Synthetic
  source 1..22: mol_type = other DNA
gcaatgctgctgtcttcttgct

SEQ ID NO: 2215 - DNA, 22 bp, synthetic construct
  misc_feature 1..22: note = Synthetic
  source 1..22: mol_type = other DNA
atgctgctgtcttcttgctatg

SEQ ID NO: 2216 - DNA, 22 bp, synthetic construct
  misc_feature 1..22: note = Synthetic
  source 1..22: mol_type = other DNA
ctgtcttcttgctatgaataat

SEQ ID NO: 2217 - DNA, 22 bp, synthetic construct
  misc_feature 1..22: note = Synthetic
  source 1..22: mol_type = other DNA
ttgtagactatcttttatattc

SEQ ID NO: 2218 - DNA, 22 bp, synthetic construct
  misc_feature 1..22: note = Synthetic
  source 1..22: mol_type = other DNA
aaatgtacaaggaccgacaagg

SEQ ID NO: 2219 - DNA, 22 bp, synthetic construct
  misc_feature 1..22: note = Synthetic
  source 1..22: mol_type = other DNA
aacaaaatgtacaaggaccgac

SEQ ID NO: 2220 - DNA, 22 bp, synthetic construct
  misc_feature 1..22: note = Synthetic
  source 1..22: mol_type = other DNA
atttccaatgggaaaaagttaa

SEQ ID NO: 2221 - DNA, 22 bp, synthetic construct
  misc_feature 1..22: note = Synthetic
  source 1..22: mol_type = other DNA
cccagcttgatttccaatggga

SEQ ID NO: 2222 - DNA, 22 bp, synthetic construct
  misc_feature 1..22: note = Synthetic
  source 1..22: mol_type = other DNA
gaagctctctcccagcttgatt

SEQ ID NO: 2223 - DNA, 22 bp, synthetic construct
  misc_feature 1..22: note = Synthetic
  source 1..22: mol_type = other DNA
gctacaggaagctctctcccag

SEQ ID NO: 2224 - DNA, 22 bp, synthetic construct
  misc_feature 1..22: note = Synthetic
  source 1..22: mol_type = other DNA
tgcaaagtgcaacgcctgtgga

SEQ ID NO: 2225 - DNA, 22 bp, synthetic construct
  misc_feature 1..22: note = Synthetic
  source 1..22: mol_type = other DNA
tagcaagaagacagcagcattg

SEQ ID NO: 2226 - DNA, 22 bp, synthetic construct
  misc_feature 1..22: note = Synthetic
  source 1..22: mol_type = other DNA
atagtctacaacaaagctcagg

SEQ ID NO: 2227 - DNA, 22 bp, synthetic construct
  misc_feature 1..22: note = Synthetic
  source 1..22: mol_type = other DNA
aaaagatagtctacaacaaagc

SEQ ID NO: 2228 - DNA, 22 bp, synthetic construct
  misc_feature 1..22: note = Synthetic
  source 1..22: mol_type = other DNA
ttttatattacagaatataaaa

SEQ ID NO: 2229 - DNA, 22 bp, synthetic construct
  misc_feature 1..22: note = Synthetic
  source 1..22: mol_type = other DNA
aatttttatattacagaatata

SEQ ID NO: 2230 - DNA, 22 bp, synthetic construct
  misc_feature 1..22: note = Synthetic
  source 1..22: mol_type = other DNA
cttgacttgctcaagcttttct

SEQ ID NO: 2231 - DNA, 22 bp, synthetic construct
  misc_feature 1..22: note = Synthetic
  source 1..22: mol_type = other DNA
ttcttttagttgctgctctttt

SEQ ID NO: 2232 - DNA, 22 bp, synthetic construct
  misc_feature 1..22: note = Synthetic
  source 1..22: mol_type = other DNA
tagttgctgctcttttccaggt

SEQ ID NO: 2233 - DNA, 22 bp, synthetic construct
  misc_feature 1..22: note = Synthetic
  source 1..22: mol_type = other DNA
gctgctcttttccaggttcaag

SEQ ID NO: 2234 - DNA, 22 bp, synthetic construct
  misc_feature 1..22: note = Synthetic
  source 1..22: mol_type = other DNA
ttccaggttcaagtgggatact

SEQ ID NO: 2235 - DNA, 22 bp, synthetic construct
  misc_feature 1..22: note = Synthetic
  source 1..22: mol_type = other DNA
atctgcttcctccaaccataaa

SEQ ID NO: 2236 - DNA, 22 bp, synthetic construct
  misc_feature 1..22: note = Synthetic
  source 1..22: mol_type = other DNA
tccaaccataaaacaaattcat

SEQ ID NO: 2237 - DNA, 22 bp, synthetic construct
  misc_feature 1..22: note = Synthetic
  source 1..22: mol_type = other DNA
aacaaattcatttaaatctctt

SEQ ID NO: 2238 - DNA, 22 bp, synthetic construct
  misc_feature 1..22: note = Synthetic
  source 1..22: mol_type = other DNA
ttaaatctctttgaaattctga

SEQ ID NO: 2239 - DNA, 22 bp, synthetic construct
  misc_feature 1..22: note = Synthetic
  source 1..22: mol_type = other DNA
aagaaaagcttgagcaagtcaa

SEQ ID NO: 2240 - DNA, 22 bp, synthetic construct
  misc_feature 1..22: note = Synthetic
  source 1..22: mol_type = other DNA
taaaagaaaagcttgagcaagt

SEQ ID NO: 2241 - DNA, 22 bp, synthetic construct
  misc_feature 1..22: note = Synthetic
  source 1..22: mol_type = other DNA
agcaactaaaagaaaagcttga

SEQ ID NO: 2242 - DNA, 22 bp, synthetic construct
  misc_feature 1..22: note = Synthetic
  source 1..22: mol_type = other DNA
gttggaggaagcagataacatt

SEQ ID NO: 2243 - DNA, 22 bp, synthetic construct
  misc_feature 1..22: note = Synthetic
  source 1..22: mol_type = other DNA
atttgttttatggttggaggaa

SEQ ID NO: 2244 - DNA, 22 bp, synthetic construct
  misc_feature 1..22: note = Synthetic
  source 1..22: mol_type = other DNA
agagatttaaatgaatttgttt

SEQ ID NO: 2245 - DNA, 22 bp, synthetic construct
  misc_feature 1..22: note = Synthetic
  source 1..22: mol_type = other DNA
tcagaatttcaaagagatttaa

SEQ ID NO: 2246 - DNA, 22 bp, synthetic construct
  misc_feature 1..22: note = Synthetic
  source 1..22: mol_type = other DNA
cttgtcagaatttcaaagagat

SEQ ID NO: 2247 - DNA, 22 bp, synthetic construct
  misc_feature 1..22: note = Synthetic
  source 1..22: mol_type = other DNA
gaatatcttgtcagaatttcaa

SEQ ID NO: 2248 - DNA, 22 bp, synthetic construct
  misc_feature 1..22: note = Synthetic
  source 1..22: mol_type = other DNA
gaagaacaaaagaatatcttgt

SEQ ID NO: 2249 - DNA, 22 bp, synthetic construct
  misc_feature 1..22: note = Synthetic
  source 1..22: mol_type = other DNA
tttctccaggctagaagaacaa

SEQ ID NO: 2250 - DNA, 22 bp, synthetic construct
  misc_feature 1..22: note = Synthetic
  source 1..22: mol_type = other DNA
taatgtctaacctttatccact

SEQ ID NO: 2251 - DNA, 22 bp, synthetic construct
  misc_feature 1..22: note = Synthetic
  source 1..22: mol_type = other DNA
atttgtctgcttgagcttattt

SEQ ID NO: 2252 - DNA, 22 bp, synthetic construct
  misc_feature 1..22: note = Synthetic
  source 1..22: mol_type = other DNA
gcttatgggagcacttacaagc

SEQ ID NO: 2253 - DNA, 22 bp, synthetic construct
  misc_feature 1..22: note = Synthetic
  source 1..22: mol_type = other DNA
gagcacttacaagcacgggtcc

SEQ ID NO: 2254 - DNA, 22 bp, synthetic construct
  misc_feature 1..22: note = Synthetic
  source 1..22: mol_type = other DNA
aagcacgggtcctccagtttca

SEQ ID NO: 2255 - DNA, 22 bp, synthetic construct
  misc_feature 1..22: note = Synthetic
  source 1..22: mol_type = other DNA
ctccagtttcatttaattgttt

SEQ ID NO: 2256 - DNA, 22 bp, synthetic construct
  misc_feature 1..22: note = Synthetic
  source 1..22: mol_type = other DNA
ctggcgcaggggcaactcttcc

SEQ ID NO: 2257 - DNA, 22 bp, synthetic construct
  misc_feature 1..22: note = Synthetic
  source 1..22: mol_type = other DNA
agcagacaaatctccagtggat

SEQ ID NO: 2258 - DNA, 22 bp, synthetic construct
  misc_feature 1..22: note = Synthetic
  source 1..22: mol_type = other DNA
agctcaagcagacaaatctcca

SEQ ID NO: 2259 - DNA, 22 bp, synthetic construct
  misc_feature 1..22: note = Synthetic
  source 1..22: mol_type = other DNA
aataagctcaagcagacaaatc

SEQ ID NO: 2260 - DNA, 22 bp, synthetic construct
  misc_feature 1..22: note = Synthetic
  source 1..22: mol_type = other DNA
acttgaaaataagctcaagcag

SEQ ID NO: 2261 - DNA, 22 bp, synthetic construct
  misc_feature 1..22: note = Synthetic
  source 1..22: mol_type = other DNA
cccagaagagcaagataaactt

SEQ ID NO: 2262 - DNA, 22 bp, synthetic construct
  misc_feature 1..22: note = Synthetic
  source 1..22: mol_type = other DNA
tgctcccataagcccagaagag

SEQ ID NO: 2263 - DNA, 22 bp, synthetic construct
  misc_feature 1..22: note = Synthetic
  source 1..22: mol_type = other DNA
tgaaactggaggacccgtgctt

SEQ ID NO: 2264 - DNA, 22 bp, synthetic construct
  misc_feature 1..22: note = Synthetic
  source 1..22: mol_type = other DNA
gcgccagggaattctcaaacaa

SEQ ID NO: 2265 - DNA, 22 bp, synthetic construct
  misc_feature 1..22: note = Synthetic
  source 1..22: mol_type = other DNA
cccctgcgccagggaattctca

SEQ ID NO: 2266 - DNA, 22 bp, synthetic construct
  misc_feature 1..22: note = Synthetic
  source 1..22: mol_type = other DNA
tggaagagttgcccctgcgcca

SEQ ID NO: 2267 - DNA, 22 bp, synthetic construct
  misc_feature 1..22: note = Synthetic
  source 1..22: mol_type = other DNA
tgtctgtttcagttactggtgg

SEQ ID NO: 2268 - DNA, 22 bp, synthetic construct
  misc_feature 1..22: note = Synthetic
  source 1..22: mol_type = other DNA
caaaaagttccctaccttaacg

SEQ ID NO: 2269 - DNA, 22 bp, synthetic construct
  misc_feature 1..22: note = Synthetic
  source 1..22: mol_type = other DNA
aaagttccctaccttaacgtca

SEQ ID NO: 2270 - DNA, 22 bp, synthetic construct
  misc_feature 1..22: note = Synthetic
  source 1..22: mol_type = other DNA
accttaacgtcaaatggtcctt

SEQ ID NO: 2271 - DNA, 22 bp, synthetic construct
  misc_feature 1..22: note = Synthetic
  source 1..22: mol_type = other DNA
aacgtcaaatggtccttcttgg

SEQ ID NO: 2272 - DNA, 22 bp, synthetic construct
  misc_feature 1..22: note = Synthetic
  source 1..22: mol_type = other DNA
tcaaatggtccttcttggtttg

SEQ ID NO: 2273 - DNA, 22 bp, synthetic construct
  misc_feature 1..22: note = Synthetic
  source 1..22: mol_type = other DNA
gtccttcttggtttggttggtt

SEQ ID NO: 2274 - DNA, 22 bp, synthetic construct
  misc_feature 1..22: note = Synthetic
  source 1..22: mol_type = other DNA
tttggttggttataaatttcca

SEQ ID NO: 2275 - DNA, 22 bp, synthetic construct
  misc_feature 1..22: note = Synthetic
  source 1..22: mol_type = other DNA
ggttataaatttccaactgatt

SEQ ID NO: 2276 - DNA, 22 bp, synthetic construct
  misc_feature 1..22: note = Synthetic
  source 1..22: mol_type = other DNA
aatttccaactgattcctaata

SEQ ID NO: 2277 - DNA, 22 bp, synthetic construct
  misc_feature 1..22: note = Synthetic
  source 1..22: mol_type = other DNA
ctaataggagataaccacagca

SEQ ID NO: 2278 - DNA, 22 bp, synthetic construct
  misc_feature 1..22: note = Synthetic
  source 1..22: mol_type = other DNA
ataggagataaccacagcagca

SEQ ID NO: 2279 - DNA, 22 bp, synthetic construct
  misc_feature 1..22: note = Synthetic
  source 1..22: mol_type = other DNA
agcagatgatttaactgctctt

SEQ ID NO: 2280 - DNA, 22 bp, synthetic construct
  misc_feature 1..22: note = Synthetic
  source 1..22: mol_type = other DNA
tcaagctttttttcaagctgcc

SEQ ID NO: 2281 - DNA, 22 bp, synthetic construct
  misc_feature 1..22: note = Synthetic
  source 1..22: mol_type = other DNA
gcccaaggtcttttatttgagc

SEQ ID NO: 2282 - DNA, 22 bp, synthetic construct
  misc_feature 1..22: note = Synthetic
  source 1..22: mol_type = other DNA
agcttcaatttctccttgtttc

SEQ ID NO: 2283 - DNA, 22 bp, synthetic construct
  misc_feature 1..22: note = Synthetic
  source 1..22: mol_type = other DNA
accaagaaggaccatttgacgt

SEQ ID NO: 2284 - DNA, 22 bp, synthetic construct
  misc_feature 1..22: note = Synthetic
  source 1..22: mol_type = other DNA
tatctcctattaggaatcagtt

SEQ ID NO: 2285 - DNA, 22 bp, synthetic construct
  misc_feature 1..22: note = Synthetic
  source 1..22: mol_type = other DNA
ctgtggttatctcctattagga

SEQ ID NO: 2286 - DNA, 22 bp, synthetic construct
  misc_feature 1..22: note = Synthetic
  source 1..22: mol_type = other DNA
gctgctgtggttatctcctatt

SEQ ID NO: 2287 - DNA, 22 bp, synthetic construct
  misc_feature 1..22: note = Synthetic
  source 1..22: mol_type = other DNA
gagcagttaaatcatctgctgc

SEQ ID NO: 2288 - DNA, 22 bp, synthetic construct
  misc_feature 1..22: note = Synthetic
  source 1..22: mol_type = other DNA
gcttgaagaccttgaagagcag

SEQ ID NO: 2289 - DNA, 22 bp, synthetic construct
  misc_feature 1..22: note = Synthetic
  source 1..22: mol_type = other DNA
aaaaagcttgaagaccttgaag

SEQ ID NO: 2290 - DNA, 22 bp, synthetic construct
  misc_feature 1..22: note = Synthetic
  source 1..22: mol_type = other DNA
agaaacaaggagaaattgaagc

SEQ ID NO: 2291 - DNA, 22 bp, synthetic construct
  misc_feature 1..22: note = Synthetic
  source 1..22: mol_type = other DNA
gagctttacctgagaaacaagg

SEQ ID NO: 2292 - DNA, 22 bp, synthetic construct
  misc_feature 1..22: note = Synthetic
  source 1..22: mol_type = other DNA
gttgcttcattaccttcactgg

SEQ ID NO: 2293 - DNA, 22 bp, synthetic construct
  misc_feature 1..22: note = Synthetic
  source 1..22: mol_type = other DNA
cattaccttcactggctgagtg

SEQ ID NO: 2294 - DNA, 22 bp, synthetic construct
  misc_feature 1..22: note = Synthetic
  source 1..22: mol_type = other DNA
tgagtggctggtttttccttgt

SEQ ID NO: 2295 - DNA, 22 bp, synthetic construct
  misc_feature 1..22: note = Synthetic
  source 1..22: mol_type = other DNA
tgtacaaatgctgccctttaga

SEQ ID NO: 2296 - DNA, 22 bp, synthetic construct
  misc_feature 1..22: note = Synthetic
  source 1..22: mol_type = other DNA
tttagacaaaatctcttccaca

SEQ ID NO: 2297 - DNA, 22 bp, synthetic construct
  misc_feature 1..22: note = Synthetic
  source 1..22: mol_type = other DNA
gttgtttagcttgaactgctat

SEQ ID NO: 2298 - DNA, 22 bp, synthetic construct
  misc_feature 1..22: note = Synthetic
  source 1..22: mol_type = other DNA
aaccagccactcagccagtgaa

SEQ ID NO: 2299 - DNA, 22 bp, synthetic construct
  misc_feature 1..22: note = Synthetic
  source 1..22: mol_type = other DNA
aaaaaccagccactcagccagt

SEQ ID NO: 2300 - DNA, 22 bp, synthetic construct
  misc_feature 1..22: note = Synthetic
  source 1..22: mol_type = other DNA
acaaggaaaaaccagccactca

SEQ ID NO: 2301 - DNA, 22 bp, synthetic construct
  misc_feature 1..22: note = Synthetic
  source 1..22: mol_type = other DNA
aagctaaacaaccggatgtgga

SEQ ID NO: 2302 - DNA, 22 bp, synthetic construct
  misc_feature 1..22: note = Synthetic
  source 1..22: mol_type = other DNA
aatagcagttcaagctaaacaa

SEQ ID NO: 2303 - DNA, 22 bp, synthetic construct
  misc_feature 1..22: note = Synthetic
  source 1..22: mol_type = other DNA
cttttccccaggaaactgaaat

SEQ ID NO: 2304 - DNA, 22 bp, synthetic construct
  misc_feature 1..22: note = Synthetic
  source 1..22: mol_type = other DNA
tgggttcttttccccaggaaac

SEQ ID NO: 2305 - DNA, 22 bp, synthetic construct
  misc_feature 1..22: note = Synthetic
  source 1..22: mol_type = other DNA
tgttaaaaaacttacttcgatc

SEQ ID NO: 2306 - DNA, 22 bp, synthetic construct
  misc_feature 1..22: note = Synthetic
  source 1..22: mol_type = other DNA
taaaaaacttacttcgatccgt

SEQ ID NO: 2307 - DNA, 22 bp, synthetic construct
  misc_feature 1..22: note = Synthetic
  source 1..22: mol_type = other DNA
tccgtaatgattgttctagcct

SEQ ID NO: 2308 - DNA, 22 bp, synthetic construct
  misc_feature 1..22: note = Synthetic
  source 1..22: mol_type = other DNA
tgattgttctagcctcttgatt

SEQ ID NO: 2309 - DNA, 22 bp, synthetic construct
  misc_feature 1..22: note = Synthetic
  source 1..22: mol_type = other DNA
tcttgattgctggtcttgtttt

SEQ ID NO: 2310 - DNA, 22 bp, synthetic construct
  misc_feature 1..22: note = Synthetic
  source 1..22: mol_type = other DNA
tcttgtttttcaaattttgggc

SEQ ID NO: 2311 - DNA, 22 bp, synthetic construct
  misc_feature 1..22: note = Synthetic
  source 1..22: mol_type = other DNA
tgtttttcaaattttgggcagc

SEQ ID NO: 2312 - DNA, 22 bp, synthetic construct
  misc_feature 1..22: note = Synthetic
  source 1..22: mol_type = other DNA
tttcaaattttgggcagcggta

SEQ ID NO: 2313 - DNA, 22 bp, synthetic construct
  misc_feature 1..22: note = Synthetic
  source 1..22: mol_type = other DNA
tccaactggggacgcctctgtt

SEQ ID NO: 2314 - DNA, 22 bp, synthetic construct
  misc_feature 1..22: note = Synthetic
  source 1..22: mol_type = other DNA
agaacaatcattacggatcgaa

SEQ ID NO: 2315 - DNA, 22 bp, synthetic construct
  misc_feature 1..22: note = Synthetic
  source 1..22: mol_type = other DNA
ggctagaacaatcattacggat

SEQ ID NO: 2316 - DNA, 22 bp, synthetic construct
  misc_feature 1..22: note = Synthetic
  source 1..22: mol_type = other DNA
tcaagaggctagaacaatcatt

SEQ ID NO: 2317 - DNA, 22 bp, synthetic construct
  misc_feature 1..22: note = Synthetic
  source 1..22: mol_type = other DNA
agaccagcaatcaagaggctag

SEQ ID NO: 2318 - DNA, 22 bp, synthetic construct
  misc_feature 1..22: note = Synthetic
  source 1..22: mol_type = other DNA
ccaaaatttgaaaaacaagacc

SEQ ID NO: 2319 - DNA, 22 bp, synthetic construct
  misc_feature 1..22: note = Synthetic
  source 1..22: mol_type = other DNA
ggaagaactcattaccgctgcc

SEQ ID NO: 2320 - DNA, 22 bp, synthetic construct
  misc_feature 1..22: note = Synthetic
  source 1..22: mol_type = other DNA
caggatttggaacagaggcgtc

SEQ ID NO: 2321 - DNA, 22 bp, synthetic construct
  misc_feature 1..22: note = Synthetic
  source 1..22: mol_type = other DNA
tttgttcttacaggcaacaatg

SEQ ID NO: 2322 - DNA, 22 bp, synthetic construct
  misc_feature 1..22: note = Synthetic
  source 1..22: mol_type = other DNA
aataatgtaattcatacctttt

SEQ ID NO: 2323 - DNA, 22 bp, synthetic construct
  misc_feature 1..22: note = Synthetic
  source 1..22: mol_type = other DNA
tatgaatgcttctccaagaggc

SEQ ID NO: 2324 - DNA, 22 bp, synthetic construct
  misc_feature 1..22: note = Synthetic
  source 1..22: mol_type = other DNA
tctctgttatcatgtggacttt

SEQ ID NO: 2325 - DNA, 22 bp, synthetic construct
  misc_feature 1..22: note = Synthetic
  source 1..22: mol_type = other DNA
tggacttttctggtatcatctg

SEQ ID NO: 2326 - DNA, 22 bp, synthetic construct
  misc_feature 1..22: note = Synthetic
  source 1..22: mol_type = other DNA
acttttctggtatcatctgcag

SEQ ID NO: 2327 - DNA, 22 bp, synthetic construct
  misc_feature 1..22: note = Synthetic
  source 1..22: mol_type = other DNA
atcatctgcagaataatcccgg

SEQ ID NO: 2328 - DNA, 22 bp, synthetic construct
  misc_feature 1..22: note = Synthetic
  source 1..22: mol_type = other DNA
taatcccggagaagtttcaggg

SEQ ID NO: 2329 - DNA, 22 bp, synthetic construct
  misc_feature 1..22: note = Synthetic
  source 1..22: mol_type = other DNA
tctacatttgtctgccactggc

SEQ ID NO: 2330 - DNA, 22 bp, synthetic construct
  misc_feature 1..22: note = Synthetic
  source 1..22: mol_type = other DNA
cggaggtctttggccaactgct

SEQ ID NO: 2331 - DNA, 22 bp, synthetic construct
  misc_feature 1..22: note = Synthetic
  source 1..22: mol_type = other DNA
tggagaagcattcataaaaggt

SEQ ID NO: 2332 - DNA, 22 bp, synthetic construct
  misc_feature 1..22: note = Synthetic
  source 1..22: mol_type = other DNA
gcctcttggagaagcattcata

SEQ ID NO: 2333 - DNA, 22 bp, synthetic construct
  misc_feature 1..22: note = Synthetic
  source 1..22: mol_type = other DNA
agtccacatgataacagagaat

SEQ ID NO: 2334 - DNA, 22 bp, synthetic construct
  misc_feature 1..22: note = Synthetic
  source 1..22: mol_type = other DNA
cagaaaagtccacatgataaca

SEQ ID NO: 2335 - DNA, 22 bp, synthetic construct
  misc_feature 1..22: note = Synthetic
  source 1..22: mol_type = other DNA
cagatgataccagaaaagtcca

SEQ ID NO: 2336 - DNA, 22 bp, synthetic construct
  misc_feature 1..22: note = Synthetic
  source 1..22: mol_type = other DNA
attattctgcagatgataccag

SEQ ID NO: 2337 - DNA, 22 bp, synthetic construct
  misc_feature 1..22: note = Synthetic
  source 1..22: mol_type = other DNA
acttctccgggattattctgca

SEQ ID NO: 2338 - DNA, 22 bp, synthetic construct
  misc_feature 1..22: note = Synthetic
  source 1..22: mol_type = other DNA
gaaacttctccgggattattct

SEQ ID NO: 2339 - DNA, 22 bp, synthetic construct
  misc_feature 1..22: note = Synthetic
  source 1..22: mol_type = other DNA
tgacttggccctgaaacttctc

SEQ ID NO: 2340 - DNA, 22 bp, synthetic construct
  misc_feature 1..22: note = Synthetic
  source 1..22: mol_type = other DNA
gtggcagacaaatgtagatgtg

SEQ ID NO: 2341 - DNA, 22 bp, synthetic construct
  misc_feature 1..22: note = Synthetic
  source 1..22: mol_type = other DNA
cctccgccagtggcagacaaat

SEQ ID NO: 2342 - DNA, 22 bp, synthetic construct
  misc_feature 1..22: note = Synthetic
  source 1..22: mol_type = other DNA
caaagacctccgccagtggcag

SEQ ID NO: 2343 - DNA, 22 bp, synthetic construct
  misc_feature 1..22: note = Synthetic
  source 1..22: mol_type = other DNA
tagcagttggccaaagacctcc

SEQ ID NO: 2344 - DNA, 22 bp, synthetic construct
  misc_feature 1..22: note = Synthetic
  source 1..22: mol_type = other DNA
ttcatcagctcttttactccct

SEQ ID NO: 2345 - DNA, 22 bp, synthetic construct
  misc_feature 1..22: note = Synthetic
  source 1..22: mol_type = other DNA
agtcttctaggagcctttcctt

SEQ ID NO: 2346 - DNA, 22 bp, synthetic construct
  misc_feature 1..22: note = Synthetic
  source 1..22: mol_type = other DNA
gggtagcatcctgtaggacatt

SEQ ID NO: 2347 - DNA, 22 bp, synthetic construct
  misc_feature 1..22: note = Synthetic
  source 1..22: mol_type = other DNA
gtaagccaggcaagaaactttt

SEQ ID NO: 2348 - DNA, 22 bp, synthetic construct
  misc_feature 1..22: note = Synthetic
  source 1..22: mol_type = other DNA
ttccaggtccagggggaactgt

SEQ ID NO: 2349 - DNA, 22 bp, synthetic construct
  misc_feature 1..22: note = Synthetic
  source 1..22: mol_type = other DNA
caggtccagggggaactgttgc

SEQ ID NO: 2350 - DNA, 22 bp, synthetic construct
  misc_feature 1..22: note = Synthetic
  source 1..22: mol_type = other DNA
gggggaactgttgcagtaatct

SEQ ID NO: 2351 - DNA, 22 bp, synthetic construct
  misc_feature 1..22: note = Synthetic
  source 1..22: mol_type = other DNA
agagctgatgaaacaatggcaa

SEQ ID NO: 2352 - DNA, 22 bp, synthetic construct
  misc_feature 1..22: note = Synthetic
  source 1..22: mol_type = other DNA
taaaagagctgatgaaacaatg

SEQ ID NO: 2353 - DNA, 22 bp, synthetic construct
  misc_feature 1..22: note = Synthetic
  source 1..22: mol_type = other DNA
aagggagtaaaagagctgatga

SEQ ID NO: 2354 - DNA, 22 bp, synthetic construct
  misc_feature 1..22: note = Synthetic
  source 1..22: mol_type = other DNA
aagactccaagggagtaaaaga

SEQ ID NO: 2355 - DNA, 22 bp, synthetic construct
  misc_feature 1..22: note = Synthetic
  source 1..22: mol_type = other DNA
aaaggctcctagaagactccaa

SEQ ID NO: 2356 - DNA, 22 bp, synthetic construct
  misc_feature 1..22: note = Synthetic
  source 1..22: mol_type = other DNA
tgaaacaactgccaatgtccta

SEQ ID NO: 2357 - DNA, 22 bp, synthetic construct
  misc_feature 1..22: note = Synthetic
  source 1..22: mol_type = other DNA
gcttacagaagctgaaacaact

SEQ ID NO: 2358 - DNA, 22 bp, synthetic construct
  misc_feature 1..22: note = Synthetic
  source 1..22: mol_type = other DNA
caacagttccccctggacctgg

SEQ ID NO: 2359 - DNA, 22 bp, synthetic construct
  misc_feature 1..22: note = Synthetic
  source 1..22: mol_type = other DNA
gaagaaactcatagattactgc

SEQ ID NO: 2360 - DNA, 22 bp, synthetic construct
  misc_feature 1..22: note = Synthetic
  source 1..22: mol_type = other DNA
gaggctgctttggaagaaactc

SEQ ID NO: 2361 - DNA, 22 bp, synthetic construct
  misc_feature 1..22: note = Synthetic
  source 1..22: mol_type = other DNA
cctaatgttgagagactttttc

SEQ ID NO: 2362 - DNA, 22 bp, synthetic construct
  misc_feature 1..22: note = Synthetic
  source 1..22: mol_type = other DNA
tttttccgaagttcactccact

SEQ ID NO: 2363 - DNA, 22 bp, synthetic construct
  misc_feature 1..22: note = Synthetic
  source 1..22: mol_type = other DNA
gactgcatcatcggaaccttcc

SEQ ID NO: 2364 - DNA, 22 bp, synthetic construct
  misc_feature 1..22: note = Synthetic
  source 1..22: mol_type = other DNA
catcggaaccttccagggatct

SEQ ID NO: 2365 - DNA, 22 bp, synthetic construct
  misc_feature 1..22: note = Synthetic
  source 1..22: mol_type = other DNA
aggattttttggctgttttcat

SEQ ID NO: 2366 - DNA, 22 bp, synthetic construct
  misc_feature 1..22: note = Synthetic
  source 1..22: mol_type = other DNA
ttttggctgttttcatccaggt

SEQ ID NO: 2367 - DNA, 22 bp, synthetic construct
  misc_feature 1..22: note = Synthetic
  source 1..22: mol_type = other DNA
tgtgataaacatctgtgtgagc

SEQ ID NO: 2368 - DNA, 22 bp, synthetic construct
  misc_feature 1..22: note = Synthetic
  source 1..22: mol_type = other DNA
gtgtgagcttcaatttcacctt

SEQ ID NO: 2369 - DNA, 22 bp, synthetic construct
  misc_feature 1..22: note = Synthetic
  source 1..22: mol_type = other DNA
cttcggaaaaagtctctcaaca

SEQ ID NO: 2370 - DNA, 22 bp, synthetic construct
  misc_feature 1..22: note = Synthetic
  source 1..22: mol_type = other DNA
ttcaagtggagtgaacttcgga

SEQ ID NO: 2371 - DNA, 22 bp, synthetic construct
  misc_feature 1..22: note = Synthetic
  source 1..22: mol_type = other DNA
tttggataacatgaacttcaag

SEQ ID NO: 2372 - DNA, 22 bp, synthetic construct
  misc_feature 1..22: note = Synthetic
  source 1..22: mol_type = other DNA
agacgtttggataacatgaact

SEQ ID NO: 2373 - DNA, 22 bp, synthetic construct
  misc_feature 1..22: note = Synthetic
  source 1..22: mol_type = other DNA
tgcagtcctgttacaaagacgt

SEQ ID NO: 2374 - DNA, 22 bp, synthetic construct
  misc_feature 1..22: note = Synthetic
  source 1..22: mol_type = other DNA
gatccctggaaggttccgatga

SEQ ID NO: 2375 - DNA, 22 bp, synthetic construct
  misc_feature 1..22: note = Synthetic
  source 1..22: mol_type = other DNA
cctgagatccctggaaggttcc

SEQ ID NO: 2376 - DNA, 22 bp, synthetic construct
  misc_feature 1..22: note = Synthetic
  source 1..22: mol_type = other DNA
aatcctgagatccctggaaggt

SEQ ID NO: 2377 - DNA, 22 bp, synthetic construct
  misc_feature 1..22: note = Synthetic
  source 1..22: mol_type = other DNA
ccaaaaaatcctgagatccctg

SEQ ID NO: 2378 - DNA, 22 bp, synthetic construct
  misc_feature 1..22: note = Synthetic
  source 1..22: mol_type = other DNA
gatgaaaacagccaaaaaatcc

SEQ ID NO: 2379 - DNA, 22 bp, synthetic construct
  misc_feature 1..22: note = Synthetic
  source 1..22: mol_type = other DNA
acaacctggatgaaaacagcca

SEQ ID NO: 2380 - DNA, 22 bp, synthetic construct
  misc_feature 1..22: note = Synthetic
  source 1..22: mol_type = other DNA
tcacacagatgtttatcacaac

SEQ ID NO: 2381 - DNA, 22 bp, synthetic construct
  misc_feature 1..22: note = Synthetic
  source 1..22: mol_type = other DNA
ccaaggtgaaattgaagctcac

SEQ ID NO: 2382 - DNA, 22 bp, synthetic construct
  misc_feature 1..22: note = Synthetic
  source 1..22: mol_type = other DNA
ctgtcctgtaggacctccaagg

SEQ ID NO: 2383 - DNA, 22 bp, synthetic construct
  misc_feature 1..22: note = Synthetic
  source 1..22: mol_type = other DNA
tcctgctgtcctgtaggacctc

SEQ ID NO: 2384 - DNA, 22 bp, synthetic construct
  misc_feature 1..22: note = Synthetic
  source 1..22: mol_type = other DNA
tcgttctgcttctgaactgctg

SEQ ID NO: 2385 - DNA, 22 bp, synthetic construct
  misc_feature 1..22: note = Synthetic
  source 1..22: mol_type = other DNA
tctgaactgctggaaagtcgcc

SEQ ID NO: 2386 - DNA, 22 bp, synthetic construct
  misc_feature 1..22: note = Synthetic
  source 1..22: mol_type = other DNA
aactgctggaaagtcgcctcca

SEQ ID NO: 2387 - DNA, 22 bp, synthetic construct
  misc_feature 1..22: note = Synthetic
  source 1..22: mol_type = other DNA
gcctccaataggtgcctgccgg

SEQ ID NO: 2388 - DNA, 22 bp, synthetic construct
  misc_feature 1..22: note = Synthetic
  source 1..22: mol_type = other DNA
atctttcagctgtagccacacc

SEQ ID NO: 2389 - DNA, 22 bp, synthetic construct
  misc_feature 1..22: note = Synthetic
  source 1..22: mol_type = other DNA
cacaccagaagttcctgcagag

SEQ ID NO: 2390 - DNA, 22 bp, synthetic construct
  misc_feature 1..22: note = Synthetic
  source 1..22: mol_type = other DNA
agagaaaggtgcagacgcttcc

SEQ ID NO: 2391 - DNA, 22 bp, synthetic construct
  misc_feature 1..22: note = Synthetic
  source 1..22: mol_type = other DNA
ttccactggtcagaactggctt

SEQ ID NO: 2392 - DNA, 22 bp, synthetic construct
  misc_feature 1..22: note = Synthetic
  source 1..22: mol_type = other DNA
ttcagaagcagaacgatgtaca

SEQ ID NO: 2393 - DNA, 22 bp, synthetic construct
  misc_feature 1..22: note = Synthetic
  source 1..22: mol_type = other DNA
ctttccagcagttcagaagcag

SEQ ID NO: 2394 - DNA, 22 bp, synthetic construct
  misc_feature 1..22: note = Synthetic
  source 1..22: mol_type = other DNA
cacctattggaggcgactttcc

SEQ ID NO: 2395 - DNA, 22 bp, synthetic construct
  misc_feature 1..22: note = Synthetic
  source 1..22: mol_type = other DNA
gtgtggctacagctgaaagatg

SEQ ID NO: 2396 - DNA, 22 bp, synthetic construct
  misc_feature 1..22: note = Synthetic
  source 1..22: mol_type = other DNA
tctggtgtggctacagctgaaa

SEQ ID NO: 2397 - DNA, 22 bp, synthetic construct
  misc_feature 1..22: note = Synthetic
  source 1..22: mol_type = other DNA
acttctggtgtggctacagctg

SEQ ID NO: 2398 - DNA, 22 bp, synthetic construct
  misc_feature 1..22: note = Synthetic
  source 1..22: mol_type = other DNA
tgcacctttctctgcaggaact

SEQ ID NO: 2399 - DNA, 22 bp, synthetic construct
  misc_feature 1..22: note = Synthetic
  source 1..22: mol_type = other DNA
tcccatttggaagccagttctg

SEQ ID NO: 2400 - DNA, 22 bp, synthetic construct
  misc_feature 1..22: note = Synthetic
  source 1..22: mol_type = other DNA
ctttttcaggtcccatttggaa

SEQ ID NO: 2401 - DNA, 22 bp, synthetic construct
  misc_feature 1..22: note = Synthetic
  source 1..22: mol_type = other DNA
cacattcaattacctctgggct

SEQ ID NO: 2402 - DNA, 22 bp, synthetic construct
  misc_feature 1..22: note = Synthetic
  source 1..22: mol_type = other DNA
tcaattacctctgggctcctgg

SEQ ID NO: 2403 - DNA, 22 bp, synthetic construct
  misc_feature 1..22: note = Synthetic
  source 1..22: mol_type = other DNA
tctgggctcctggtagagtttc

SEQ ID NO: 2404 - DNA, 22 bp, synthetic construct
  misc_feature 1..22: note = Synthetic
  source 1..22: mol_type = other DNA
tccttccaaaggctgctctgtc

SEQ ID NO: 2405 - DNA, 22 bp, synthetic construct
  misc_feature 1..22: note = Synthetic
  source 1..22: mol_type = other DNA
gctgctctgtcagaaatattcg

SEQ ID NO: 2406 - DNA, 22 bp, synthetic construct
  misc_feature 1..22: note = Synthetic
  source 1..22: mol_type = other DNA
tcagaaatattcgtacagtctc

SEQ ID NO: 2407 - DNA, 22 bp, synthetic construct
  misc_feature 1..22: note = Synthetic
  source 1..22: mol_type = other DNA
ttcgtacagtctcaagagtact

SEQ ID NO: 2408 - DNA, 22 bp, synthetic construct
  misc_feature 1..22: note = Synthetic
  source 1..22: mol_type = other DNA
agtctcaagagtactcatgatt

SEQ ID NO: 2409 - DNA, 22 bp, synthetic construct
  misc_feature 1..22: note = Synthetic
  source 1..22: mol_type = other DNA
gagtactcatgattacaggttc

SEQ ID NO: 2410 - DNA, 22 bp, synthetic construct
  misc_feature 1..22: note = Synthetic
  source 1..22: mol_type = other DNA
catgattacaggttctttagtt

SEQ ID NO: 2411 - DNA, 22 bp, synthetic construct
  misc_feature 1..22: note = Synthetic
  source 1..22: mol_type = other DNA
gaaactctaccaggagcccaga

SEQ ID NO: 2412 - DNA, 22 bp, synthetic construct
  misc_feature 1..22: note = Synthetic
  source 1..22: mol_type = other DNA
agagaaactctaccaggagccc

SEQ ID NO: 2413 - DNA, 22 bp, synthetic construct
  misc_feature 1..22: note = Synthetic
  source 1..22: mol_type = other DNA
tcatgagtactcttgagactgt

SEQ ID NO: 2414 - DNA, 22 bp, synthetic construct
  misc_feature 1..22: note = Synthetic
  source 1..22: mol_type = other DNA
gaaaactaaagaacctgtaatc

SEQ ID NO: 2415 - DNA, 22 bp, synthetic construct
  misc_feature 1..22: note = Synthetic
  source 1..22: mol_type = other DNA
gggaattgaaaactaaagaacc

SEQ ID NO: 2416 - DNA, 22 bp, synthetic construct
  misc_feature 1..22: note = Synthetic
  source 1..22: mol_type = other DNA
ctcatttcacaggccttcaaga

SEQ ID NO: 2417 - DNA, 22 bp, synthetic construct
  misc_feature 1..22: note = Synthetic
  source 1..22: mol_type = other DNA
gtagacggtaccttgactttct

SEQ ID NO: 2418 - DNA, 22 bp, synthetic construct
  misc_feature 1..22: note = Synthetic
  source 1..22: mol_type = other DNA
gacggtaccttgactttctcga

SEQ ID NO: 2419 - DNA, 22 bp, synthetic construct
  misc_feature 1..22: note = Synthetic
  source 1..22: mol_type = other DNA
actttctcgaggtgatcttgga

SEQ ID NO: 2420 - DNA, 22 bp, synthetic construct
  misc_feature 1..22: note = Synthetic
  source 1..22: mol_type = other DNA
tctcgaggtgatcttggagaga

SEQ ID NO: 2421 - DNA, 22 bp, synthetic construct
  misc_feature 1..22: note = Synthetic
  source 1..22: mol_type = other DNA
tgatcttggagagagtcaatga

SEQ ID NO: 2422 - DNA, 22 bp, synthetic construct
  misc_feature 1..22: note = Synthetic
  source 1..22: mol_type = other DNA
gaggagatcgcccacgggctgc

SEQ ID NO: 2423 - DNA, 22 bp, synthetic construct
  misc_feature 1..22: note = Synthetic
  source 1..22: mol_type = other DNA
cgcccacgggctgccaggatcc

SEQ ID NO: 2424 - DNA, 22 bp, synthetic construct
  misc_feature 1..22: note = Synthetic
  source 1..22: mol_type = other DNA
atcacctcagcttggcgcagct

SEQ ID NO: 2425 - DNA, 22 bp, synthetic construct
  misc_feature 1..22: note = Synthetic
  source 1..22: mol_type = other DNA
gtccagctcatccgtggcctct

SEQ ID NO: 2426 - DNA, 22 bp, synthetic construct
  misc_feature 1..22: note = Synthetic
  source 1..22: mol_type = other DNA
atccgtggcctcttgaagttcc

SEQ ID NO: 2427 - DNA, 22 bp, synthetic construct
  misc_feature 1..22: note = Synthetic
  source 1..22: mol_type = other DNA
cttgaagttcccggagtctttc

SEQ ID NO: 2428 - DNA, 22 bp, synthetic construct
  misc_feature 1..22: note = Synthetic
  source 1..22: mol_type = other DNA
agggtctcatctatttttctct

SEQ ID NO: 2429 - DNA, 22 bp, synthetic construct
  misc_feature 1..22: note = Synthetic
  source 1..22: mol_type = other DNA
tctatttttctctgccagtcag

SEQ ID NO: 2430 - DNA, 22 bp, synthetic construct
  misc_feature 1..22: note = Synthetic
  source 1..22: mol_type = other DNA
tttctctgccagtcagcggagt

SEQ ID NO: 2431 - DNA, 22 bp, synthetic construct
  misc_feature 1..22: note = Synthetic
  source 1..22: mol_type = other DNA
ctgccagtcagcggagtgcagg

SEQ ID NO: 2432 - DNA, 22 bp, synthetic construct
  misc_feature 1..22: note = Synthetic
  source 1..22: mol_type = other DNA
agtgcaggttcaatttttccca

SEQ ID NO: 2433 - DNA, 22 bp, synthetic construct
  misc_feature 1..22: note = Synthetic
  source 1..22: mol_type = other DNA
cctcagcctgctttcgtagaag

SEQ ID NO: 2434 - DNA, 22 bp, synthetic construct
  misc_feature 1..22: note = Synthetic
  source 1..22: mol_type = other DNA
gctctctcctcaggaggcagct

SEQ ID NO: 2435 - DNA, 22 bp, synthetic construct
  misc_feature 1..22: note = Synthetic
  source 1..22: mol_type = other DNA
tccaagatcacctcgagaaagt

SEQ ID NO: 2436 - DNA, 22 bp, synthetic construct
  misc_feature 1..22: note = Synthetic
  source 1..22: mol_type = other DNA
actctctccaagatcacctcga

SEQ ID NO: 2437 - DNA, 22 bp, synthetic construct
  misc_feature 1..22: note = Synthetic
  source 1..22: mol_type = other DNA
cgatctcctcattgactctctc

SEQ ID NO: 2438 - DNA, 22 bp, synthetic construct
  misc_feature 1..22: note = Synthetic
  source 1..22: mol_type = other DNA
caagggatcctggcagcccgtg

SEQ ID NO: 2439 - DNA, 22 bp, synthetic construct
  misc_feature 1..22: note = Synthetic
  source 1..22: mol_type = other DNA
ctgcgccaagctgaggtgatca

SEQ ID NO: 2440 - DNA, 22 bp, synthetic construct
  misc_feature 1..22: note = Synthetic
  source 1..22: mol_type = other DNA
acctcaagctgcgccaagctga

SEQ ID NO: 2441 - DNA, 22 bp, synthetic construct
  misc_feature 1..22: note = Synthetic
  source 1..22: mol_type = other DNA
tggacctcaagctgcgccaagc

SEQ ID NO: 2442 - DNA, 22 bp, synthetic construct
  misc_feature 1..22: note = Synthetic
  source 1..22: mol_type = other DNA
actccgggaacttcaagaggcc

SEQ ID NO: 2443 - DNA, 22 bp, synthetic construct
  misc_feature 1..22: note = Synthetic
  source 1..22: mol_type = other DNA
ctccgctgactggcagagaaaa

SEQ ID NO: 2444 - DNA, 22 bp, synthetic construct
  misc_feature 1..22: note = Synthetic
  source 1..22: mol_type = other DNA
tgcactccgctgactggcagag

SEQ ID NO: 2445 - DNA, 22 bp, synthetic construct
  misc_feature 1..22: note = Synthetic
  source 1..22: mol_type = other DNA
gaggaggtcaatactgagtggg

SEQ ID NO: 2446 - DNA, 22 bp, synthetic construct
  misc_feature 1..22: note = Synthetic
  source 1..22: mol_type = other DNA
aagcaggctgaggaggtcaata

SEQ ID NO: 2447 - DNA, 22 bp, synthetic construct
  misc_feature 1..22: note = Synthetic
  source 1..22: mol_type = other DNA
tctacgaaagcaggctgaggag

SEQ ID NO: 2448 - DNA, 22 bp, synthetic construct
  misc_feature 1..22: note = Synthetic
  source 1..22: mol_type = other DNA
ggcttctacgaaagcaggctga

SEQ ID NO: 2449 - DNA, 22 bp, synthetic construct
  misc_feature 1..22: note = Synthetic
  source 1..22: mol_type = other DNA
gctgcctcctgaggagagagcc

SEQ ID NO: 2450 - DNA, 22 bp, synthetic construct
  misc_feature 1..22: note = Synthetic
  source 1..22: mol_type = other DNA
tgcttacctgcagaagcttcca

SEQ ID NO: 2451 - DNA, 22 bp, synthetic construct
  misc_feature 1..22: note = Synthetic
  source 1..22: mol_type = other DNA
tgcagaagcttccatctggtgt

SEQ ID NO: 2452 - DNA, 22 bp, synthetic construct
  misc_feature 1..22: note = Synthetic
  source 1..22: mol_type = other DNA
tccatctggtgttcaggtcttc

SEQ ID NO: 2453 - DNA, 22 bp, synthetic construct
  misc_feature 1..22: note = Synthetic
  source 1..22: mol_type = other DNA
gtgttcaggtcttccagagtgc

SEQ ID NO: 2454 - DNA, 22 bp, synthetic construct
  misc_feature 1..22: note = Synthetic
  source 1..22: mol_type = other DNA
gtcttccagagtgctgaggtta

SEQ ID NO: 2455 - DNA, 22 bp, synthetic construct
  misc_feature 1..22: note = Synthetic
  source 1..22: mol_type = other DNA
tgctgaggttatacggtgagag

SEQ ID NO: 2456 - DNA, 22 bp, synthetic construct
  misc_feature 1..22: note = Synthetic
  source 1..22: mol_type = other DNA
tatacggtgagagctgaatgcc

SEQ ID NO: 2457 - DNA, 22 bp, synthetic construct
  misc_feature 1..22: note = Synthetic
  source 1..22: mol_type = other DNA
acggtgagagctgaatgcccaa

SEQ ID NO: 2458 - DNA, 22 bp, synthetic construct
  misc_feature 1..22: note = Synthetic
  source 1..22: mol_type = other DNA
cccaaagtggtaagctggcgag

SEQ ID NO: 2459 - DNA, 22 bp, synthetic construct
  misc_feature 1..22: note = Synthetic
  source 1..22: mol_type = other DNA
ggctcacgttctctttcagagg

SEQ ID NO: 2460 - DNA, 22 bp, synthetic construct
  misc_feature 1..22: note = Synthetic
  source 1..22: mol_type = other DNA
tttcagaggcgcaatttctcct

SEQ ID NO: 2461 - DNA, 22 bp, synthetic construct
  misc_feature 1..22: note = Synthetic
  source 1..22: mol_type = other DNA
tgaacaccagatggaagcttct

SEQ ID NO: 2462 - DNA, 22 bp, synthetic construct
  misc_feature 1..22: note = Synthetic
  source 1..22: mol_type = other DNA
agcactctggaagacctgaaca

SEQ ID NO: 2463 - DNA, 22 bp, synthetic construct
  misc_feature 1..22: note = Synthetic
  source 1..22: mol_type = other DNA
tctgaaagagaacgtgagccac

SEQ ID NO: 2464 - DNA, 22 bp, synthetic construct
  misc_feature 1..22: note = Synthetic
  source 1..22: mol_type = other DNA
attgcacacaggcacttcgagg

SEQ ID NO: 2465 - DNA, 22 bp, synthetic construct
  misc_feature 1..22: note = Synthetic
  source 1..22: mol_type = other DNA
gctgaaaatgacttactggaaa

SEQ ID NO: 2466 - DNA, 22 bp, synthetic construct
  misc_feature 1..22: note = Synthetic
  source 1..22: mol_type = other DNA
tgacttactggaaagaaagtgc

SEQ ID NO: 2467 - DNA, 22 bp, synthetic construct
  misc_feature 1..22: note = Synthetic
  source 1..22: mol_type = other DNA
agaaagtgctgagatgctggac

SEQ ID NO: 2468 - DNA, 22 bp, synthetic construct
  misc_feature 1..22: note = Synthetic
  source 1..22: mol_type = other DNA
tgggcttcatgcagctgcctga

SEQ ID NO: 2469 - DNA, 22 bp, synthetic construct
  misc_feature 1..22: note = Synthetic
  source 1..22: mol_type = other DNA
gcatctcagcactttctttcca

SEQ ID NO: 2470 - DNA, 22 bp, synthetic construct
  misc_feature 1..22: note = Synthetic
  source 1..22: mol_type = other DNA
tccagcatctcagcactttctt

SEQ ID NO: 2471 - DNA, 22 bp, synthetic construct
  misc_feature 1..22: note = Synthetic
  source 1..22: mol_type = other DNA
gctgcatgaagcccacagggac

SEQ ID NO: 2472 - DNA, 22 bp, synthetic construct
  misc_feature 1..22: note = Synthetic
  source 1..22: mol_type = other DNA
cctcccaggtggccgtcgagga

SEQ ID NO: 2473 - DNA, 22 bp, synthetic construct
  misc_feature 1..22: note = Synthetic
  source 1..22: mol_type = other DNA
gtgatacttccaacttacttga

SEQ ID NO: 2474 - DNA, 22 bp, synthetic construct
  misc_feature 1..22: note = Synthetic
  source 1..22: mol_type = other DNA
tatagtagggcactttgtttgg

SEQ ID NO: 2475 - DNA, 22 bp, synthetic construct
  misc_feature 1..22: note = Synthetic
  source 1..22: mol_type = other DNA
acaaagtgccctactatatcaa

SEQ ID NO: 2476 - DNA, 22 bp, synthetic construct
  misc_feature 1..22: note = Synthetic
  source 1..22: mol_type = other DNA
ccaaacaaagtgccctactata

SEQ ID NO: 2477 - DNA, 22 bp, synthetic construct
  misc_feature 1..22: note = Synthetic
  source 1..22: mol_type = other DNA
gggagagagccatctcgccaaa

SEQ ID NO: 2478 - DNA, 22 bp, synthetic construct
  misc_feature 1..22: note = Synthetic
  source 1..22: mol_type = other DNA
tcccttcttttcagcgtctgtc

SEQ ID NO: 2479 - DNA, 22 bp, synthetic construct
  misc_feature 1..22: note = Synthetic
  source 1..22: mol_type = other DNA
atggccatgtccttacctaaag

SEQ ID NO: 2480 - DNA, 22 bp, synthetic construct
  misc_feature 1..22: note = Synthetic
  source 1..22: mol_type = other DNA
gactggtagagctctgtcattt

SEQ ID NO: 2481 - DNA, 22 bp, synthetic construct
  misc_feature 1..22: note = Synthetic
  source 1..22: mol_type = other DNA
tggtagagctctgtcattttgg

SEQ ID NO: 2482 - DNA, 22 bp, synthetic construct
  misc_feature 1..22: note = Synthetic
  source 1..22: mol_type = other DNA
ctgtcattttgggatggtccca

SEQ ID NO: 2483 - DNA, 22 bp, synthetic construct
  misc_feature 1..22: note = Synthetic
  source 1..22: mol_type = other DNA
tgggatggtcccagcaagttgt

SEQ ID NO: 2484 - DNA, 22 bp, synthetic construct
  misc_feature 1..22: note = Synthetic
  source 1..22: mol_type = other DNA
aatgacagagctctaccagtct

SEQ ID NO: 2485 - DNA, 22 bp, synthetic construct
  misc_feature 1..22: note = Synthetic
  source 1..22: mol_type = other DNA
catcccaaaatgacagagctct

SEQ ID NO: 2486 - DNA, 22 bp, synthetic construct
  misc_feature 1..22: note = Synthetic
  source 1..22: mol_type = other DNA
aaacaacttgctgggaccatcc

SEQ ID NO: 2487 - DNA, 22 bp, synthetic construct
  misc_feature 1..22: note = Synthetic
  source 1..22: mol_type = other DNA
atacttacagcaaagggccttc

SEQ ID NO: 2488 - DNA, 22 bp, synthetic construct
  misc_feature 1..22: note = Synthetic
  source 1..22: mol_type = other DNA
gcaaagggccttctgcagtctt

SEQ ID NO: 2489 - DNA, 22 bp, synthetic construct
  misc_feature 1..22: note = Synthetic
  source 1..22: mol_type = other DNA
tctgcagtcttcggagtttcat

SEQ ID NO: 2490 - DNA, 22 bp, synthetic construct
  misc_feature 1..22: note = Synthetic
  source 1..22: mol_type = other DNA
tttcatggcagtcctataagct

SEQ ID NO: 2491 - DNA, 22 bp, synthetic construct
  misc_feature 1..22: note = Synthetic
  source 1..22: mol_type = other DNA
taagctgagaatctgacattat

SEQ ID NO: 2492 - DNA, 22 bp, synthetic construct
  misc_feature 1..22: note = Synthetic
  source 1..22: mol_type = other DNA
agactgcagaaggccctttgct

SEQ ID NO: 2493 - DNA, 22 bp, synthetic construct
  misc_feature 1..22: note = Synthetic
  source 1..22: mol_type = other DNA
ttttcagctgacctgaataatg

SEQ ID NO: 2494 - DNA, 22 bp, synthetic construct
  misc_feature 1..22: note = Synthetic
  source 1..22: mol_type = other DNA
ttccctcttttcagctgacctg

SEQ ID NO: 2495 - DNA, 22 bp, synthetic construct
  misc_feature 1..22: note = Synthetic
  source 1..22: mol_type = other DNA
gttttccctcttttcagctgac

SEQ ID NO: 2496 - DNA, 22 bp, synthetic construct
  misc_feature 1..22: note = Synthetic
  source 1..22: mol_type = other DNA
tacgtatcataaacattcagca

SEQ ID NO: 2497 - DNA, 22 bp, synthetic construct
  misc_feature 1..22: note = Synthetic
  source 1..22: mol_type = other DNA
tccacgcagagagggacgttga

SEQ ID NO: 2498 - DNA, 22 bp, synthetic construct
  misc_feature 1..22: note = Synthetic
  source 1..22: mol_type = other DNA
aaattgttgtgctcttgctcca

SEQ ID NO: 2499 - DNA, 22 bp, synthetic construct
  misc_feature 1..22: note = Synthetic
  source 1..22: mol_type = other DNA
tgtgctcttgctccaggcggtc

SEQ ID NO: 2500 - DNA, 22 bp, synthetic construct
  misc_feature 1..22: note = Synthetic
  source 1..22: mol_type = other DNA
gctcttgctccaggcggtcata

SEQ ID NO: 2501 - DNA, 22 bp, synthetic construct
  misc_feature 1..22: note = Synthetic
  source 1..22: mol_type = other DNA
cttgctccaggcggtcataaat

SEQ ID NO: 2502 - DNA, 22 bp, synthetic construct
  misc_feature 1..22: note = Synthetic
  source 1..22: mol_type = other DNA
aggcggtcataaatagtggtca

SEQ ID NO: 2503 - DNA, 22 bp, synthetic construct
  misc_feature 1..22: note = Synthetic
  source 1..22: mol_type = other DNA
ggtcataaatagtggtcaaaca

SEQ ID NO: 2504 - DNA, 22 bp, synthetic construct
  misc_feature 1..22: note = Synthetic
  source 1..22: mol_type = other DNA
cataaatagtggtcaaacaatt

SEQ ID NO: 2505 - DNA, 22 bp, synthetic construct
  misc_feature 1..22: note = Synthetic
  source 1..22: mol_type = other DNA
tggtcaaacaattaataatctg

SEQ ID NO: 2506 - DNA, 22 bp, synthetic construct
  misc_feature 1..22: note = Synthetic
  source 1..22: mol_type = other DNA
ataatctgcaggatatccatgg

SEQ ID NO: 2507 - DNA, 22 bp, synthetic construct
  misc_feature 1..22: note = Synthetic
  source 1..22: mol_type = other DNA
tccatgggctggtcattttgct

SEQ ID NO: 2508 - DNA, 22 bp, synthetic construct
  misc_feature 1..22: note = Synthetic
  source 1..22: mol_type = other DNA
tggtcattttgcttgaggttgt

SEQ ID NO: 2509 - DNA, 22 bp, synthetic construct
  misc_feature 1..22: note = Synthetic
  source 1..22: mol_type = other DNA
tcacatgcagctgacaggctca

SEQ ID NO: 2510 - DNA, 22 bp, synthetic construct
  misc_feature 1..22: note = Synthetic
  source 1..22: mol_type = other DNA
tctgaactggctgctgaatgtt

SEQ ID NO: 2511 - DNA, 22 bp, synthetic construct
  misc_feature 1..22: note = Synthetic
  source 1..22: mol_type = other DNA
ggatatgtgtctgaactggctg

SEQ ID NO: 2512 - DNA, 22 bp, synthetic construct
  misc_feature 1..22: note = Synthetic
  source 1..22: mol_type = other DNA
tttggtcaacgtccctctctgc

SEQ ID NO: 2513 - DNA, 22 bp, synthetic construct
  misc_feature 1..22: note = Synthetic
  source 1..22: mol_type = other DNA
gcctggagcaagagcacaacaa

SEQ ID NO: 2514 - DNA, 22 bp, synthetic construct
  misc_feature 1..22: note = Synthetic
  source 1..22: mol_type = other DNA
tgaccgcctggagcaagagcac

SEQ ID NO: 2515 - DNA, 22 bp, synthetic construct
  misc_feature 1..22: note = Synthetic
  source 1..22: mol_type = other DNA
gcccatggatatcctgcagatt

SEQ ID NO: 2516 - DNA, 22 bp, synthetic construct
  misc_feature 1..22: note = Synthetic
  source 1..22: mol_type = other DNA
atgaccagcccatggatatcct

SEQ ID NO: 2517 - DNA, 22 bp, synthetic construct
  misc_feature 1..22: note = Synthetic
  source 1..22: mol_type = other DNA
cctcaagcaaaatgaccagccc

SEQ ID NO: 2518 - DNA, 22 bp, synthetic construct
  misc_feature 1..22: note = Synthetic
  source 1..22: mol_type = other DNA
cttggaccagcacaacctcaag

SEQ ID NO: 2519 - DNA, 22 bp, synthetic construct
  misc_feature 1..22: note = Synthetic
  source 1..22: mol_type = other DNA
tctcttgagcctgtcagctgca

SEQ ID NO: 2520 - DNA, 22 bp, synthetic construct
  misc_feature 1..22: note = Synthetic
  source 1..22: mol_type = other DNA
gacttacatctgtacttgtctt

SEQ ID NO: 2521 - DNA, 22 bp, synthetic construct
  misc_feature 1..22: note = Synthetic
  source 1..22: mol_type = other DNA
cttccaaatgtgctttacacag

SEQ ID NO: 2522 - DNA, 22 bp, synthetic construct
  misc_feature 1..22: note = Synthetic
  source 1..22: mol_type = other DNA
ccaaatgtgctttacacaggga

SEQ ID NO: 2523 - DNA, 22 bp, synthetic construct
  misc_feature 1..22: note = Synthetic
  source 1..22: mol_type = other DNA
gtgctttacacagggaaatgat

SEQ ID NO: 2524 - DNA, 22 bp, synthetic construct
  misc_feature 1..22: note = Synthetic
  source 1..22: mol_type = other DNA
tgccagttttaaaagacaggac

SEQ ID NO: 2525 - DNA, 22 bp, synthetic construct
  misc_feature 1..22: note = Synthetic
  source 1..22: mol_type = other DNA
catttggaagacaagtacagat

SEQ ID NO: 2526 - DNA, 22 bp, synthetic construct
  misc_feature 1..22: note = Synthetic
  source 1..22: mol_type = other DNA
aaagcacatttggaagacaagt

SEQ ID NO: 2527 - DNA, 22 bp, synthetic construct
  misc_feature 1..22: note = Synthetic
  source 1..22: mol_type = other DNA
ctgtgtaaagcacatttggaag

SEQ ID NO: 2528 - DNA, 22 bp, synthetic construct
  misc_feature 1..22: note = Synthetic
  source 1..22: mol_type = other DNA
ttcataataggggacgaacagg

SEQ ID NO: 2529 - DNA, 22 bp, synthetic construct
  misc_feature 1..22: note = Synthetic
  source 1..22: mol_type = other DNA
ggaagcagctccggacacttgg

SEQ ID NO: 2530 - DNA, 22 bp, synthetic construct
  misc_feature 1..22: note = Synthetic
  source 1..22: mol_type = other DNA
tggctcaatgttactgccccca

SEQ ID NO: 2531 - DNA, 22 bp, synthetic construct
  misc_feature 1..22: note = Synthetic
  source 1..22: mol_type = other DNA
atgcaacttcacccaactgtct

SEQ ID NO: 2532 - DNA, 22 bp, synthetic construct
  misc_feature 1..22: note = Synthetic
  source 1..22: mol_type = other DNA
cttcacccaactgtcttggaat

SEQ ID NO: 2533 - DNA, 22 bp, synthetic construct
  misc_feature 1..22: note = Synthetic
  source 1..22: mol_type = other DNA
cccaactgtcttggaatttgga

SEQ ID NO: 2534 - DNA, 22 bp, synthetic construct
  misc_feature 1..22: note = Synthetic
  source 1..22: mol_type = other DNA
tgcagaaggaggcccagcctgc

SEQ ID NO: 2535 - DNA, 22 bp, synthetic construct
  misc_feature 1..22: note = Synthetic
  source 1..22: mol_type = other DNA
gaggcccagcctgcgctggtca

SEQ ID NO: 2536 - DNA, 22 bp, synthetic construct
  misc_feature 1..22: note = Synthetic
  source 1..22: mol_type = other DNA
gttgaacttgccacttgcttga

SEQ ID NO: 2537 - DNA, 22 bp, synthetic construct
  misc_feature 1..22: note = Synthetic
  source 1..22: mol_type = other DNA
tgtccggagctgcttccaattt

SEQ ID NO: 2538 - DNA, 22 bp, synthetic construct
  misc_feature 1..22: note = Synthetic
  source 1..22: mol_type = other DNA
gagccaagtgtccggagctgct

SEQ ID NO: 2539 - DNA, 22 bp, synthetic construct
  misc_feature 1..22: note = Synthetic
  source 1..22: mol_type = other DNA
ctttgggggcagtaacattgag

SEQ ID NO: 2540 - DNA, 22 bp, synthetic construct
  misc_feature 1..22: note = Synthetic
  source 1..22: mol_type = other DNA
gggtgaagttgcatcctttggg

SEQ ID NO: 2541 - DNA, 22 bp, synthetic construct
  misc_feature 1..22: note = Synthetic
  source 1..22: mol_type = other DNA
tccaaattccaagacagttggg

SEQ ID NO: 2542 - DNA, 22 bp, synthetic construct
  misc_feature 1..22: note = Synthetic
  source 1..22: mol_type = other DNA
ttctatccaaattccaagacag

SEQ ID NO: 2543 - DNA, 22 bp, synthetic construct
  misc_feature 1..22: note = Synthetic
  source 1..22: mol_type = other DNA
catgattctatccaaattccaa

SEQ ID NO: 2544 - DNA, 22 bp, synthetic construct
  misc_feature 1..22: note = Synthetic
  source 1..22: mol_type = other DNA
gcctccttctgcatgattctat

SEQ ID NO: 2545 - DNA, 22 bp, synthetic construct
  misc_feature 1..22: note = Synthetic
  source 1..22: mol_type = other DNA
gcgcaggctgggcctccttctg

SEQ ID NO: 2546 - DNA, 22 bp, synthetic construct
  misc_feature 1..22: note = Synthetic
  source 1..22: mol_type = other DNA
ttcaagcaagtggcaagttcaa

SEQ ID NO: 2547 - DNA, 22 bp, synthetic construct
  misc_feature 1..22: note = Synthetic
  source 1..22: mol_type = other DNA
tgtagaccttttcaagcaagtg

SEQ ID NO: 2548 - DNA, 22 bp, synthetic construct
  misc_feature 1..22: note = Synthetic
  source 1..22: mol_type = other DNA
cttcctttgtagaccttttcaa

SEQ ID NO: 2549 - DNA, 22 bp, synthetic construct
  misc_feature 1..22: note = Synthetic
  source 1..22: mol_type = other DNA
tttttggttcctaatacctgaa

SEQ ID NO: 2550 - DNA, 22 bp, synthetic construct
  misc_feature 1..22: note = Synthetic
  source 1..22: mol_type = other DNA
ttggttcctaatacctgaatcc

SEQ ID NO: 2551 - DNA, 22 bp, synthetic construct
  misc_feature 1..22: note = Synthetic
  source 1..22: mol_type = other DNA
atccaatgattggacactcttt

SEQ ID NO: 2552 - DNA, 22 bp, synthetic construct
  misc_feature 1..22: note = Synthetic
  source 1..22: mol_type = other DNA
tctttgcagatgttacatttgg

SEQ ID NO: 2553 - DNA, 22 bp, synthetic construct
  misc_feature 1..22: note = Synthetic
  source 1..22: mol_type = other DNA
tgttacatttggcctgatgctt

SEQ ID NO: 2554 - DNA, 22 bp, synthetic construct
  misc_feature 1..22: note = Synthetic
  source 1..22: mol_type = other DNA
gacgggcagccacaccatggac

SEQ ID NO: 2555 - DNA, 22 bp, synthetic construct
  misc_feature 1..22: note = Synthetic
  source 1..22: mol_type = other DNA
cagccacaccatggactggggt

SEQ ID NO: 2556 - DNA, 22 bp, synthetic construct
  misc_feature 1..22: note = Synthetic
  source 1..22: mol_type = other DNA
atggactggggttccagtctca

SEQ ID NO: 2557 - DNA, 22 bp, synthetic construct
  misc_feature 1..22: note = Synthetic
  source 1..22: mol_type = other DNA
tccagtctaggaagagggccgc

SEQ ID NO: 2558 - DNA, 22 bp, synthetic construct
  misc_feature 1..22: note = Synthetic
  source 1..22: mol_type = other DNA
aaagagtgtccaatcattggat

SEQ ID NO: 2559 - DNA, 22 bp, synthetic construct
  misc_feature 1..22: note = Synthetic
  source 1..22: mol_type = other DNA
atctgcaaagagtgtccaatca

SEQ ID NO: 2560 - DNA, 22 bp, synthetic construct
  misc_feature 1..22: note = Synthetic
  source 1..22: mol_type = other DNA
aatgtaacatctgcaaagagtg

SEQ ID NO: 2561 - DNA, 22 bp, synthetic construct
  misc_feature 1..22: note = Synthetic
  source 1..22: mol_type = other DNA
caggccaaatgtaacatctgca

SEQ ID NO: 2562 - DNA, 22 bp, synthetic construct
  misc_feature 1..22: note = Synthetic
  source 1..22: mol_type = other DNA
gcagaaactgccaagcatcagg

SEQ ID NO: 2563 - DNA, 22 bp, synthetic construct
  misc_feature 1..22: note = Synthetic
  source 1..22: mol_type = other DNA
tggtgtggctgcccgtcctgca

SEQ ID NO: 2564 - DNA, 22 bp, synthetic construct
  misc_feature 1..22: note = Synthetic
  source 1..22: mol_type = other DNA
ggatgagactggaaccccagtc

SEQ ID NO: 2565 - DNA, 22 bp, synthetic construct
  misc_feature 1..22: note = Synthetic
  source 1..22: mol_type = other DNA
ctagactggatgagactggaac

SEQ ID NO: 2566 - DNA, 22 bp, synthetic construct
  misc_feature 1..22: note = Synthetic
  source 1..22: mol_type = other DNA
tcgaagcggccctcttcctaga

SEQ ID NO: 2567 - DNA, 22 bp, synthetic construct
  misc_feature 1..22: note = Synthetic
  source 1..22: mol_type = other DNA
ctttgcaggctaataataagcc

SEQ ID NO: 2568 - DNA, 22 bp, synthetic construct
  misc_feature 1..22: note = Synthetic
  source 1..22: mol_type = other DNA
gctggcgtcaaacttaccggag

SEQ ID NO: 2569 - DNA, 22 bp, synthetic construct
  misc_feature 1..22: note = Synthetic
  source 1..22: mol_type = other DNA
accggagtgcaatattccacca

SEQ ID NO: 2570 - DNA, 22 bp, synthetic construct
  misc_feature 1..22: note = Synthetic
  source 1..22: mol_type = other DNA
ggagtgcaatattccaccatgg

SEQ ID NO: 2571 - DNA, 22 bp, synthetic construct
  misc_feature 1..22: note = Synthetic
  source 1..22: mol_type = other DNA
gaccagaaaaaaagcagctttg

SEQ ID NO: 2572 - DNA, 22 bp, synthetic construct
  misc_feature 1..22: note = Synthetic
  source 1..22: mol_type = other DNA
aaaaagcagctttggcagatgt

SEQ ID NO: 2573 - DNA, 22 bp, synthetic construct
  misc_feature 1..22: note = Synthetic
  source 1..22: mol_type = other DNA
cagctttggcagatgtcataat

SEQ ID NO: 2574 - DNA, 22 bp, synthetic construct
  misc_feature 1..22: note = Synthetic
  source 1..22: mol_type = other DNA
taaagtgctttagactcctgta

SEQ ID NO: 2575 - DNA, 22 bp, synthetic construct
  misc_feature 1..22: note = Synthetic
  source 1..22: mol_type = other DNA
catggtggaatattgcactccg

SEQ ID NO: 2576 - DNA, 22 bp, synthetic construct
  misc_feature 1..22: note = Synthetic
  source 1..22: mol_type = other DNA
atcccatggtggaatattgcac

SEQ ID NO: 2577 - DNA, 22 bp, synthetic construct
  misc_feature 1..22: note = Synthetic
  source 1..22: mol_type = other DNA
cataaaatgcactatcccatgg

SEQ ID NO: 2578 - DNA, 22 bp, synthetic construct
  misc_feature 1..22: note = Synthetic
  source 1..22: mol_type = other DNA
aaggccataaaatgcactatcc

SEQ ID NO: 2579 - DNA, 22 bp, synthetic construct
  misc_feature 1..22: note = Synthetic
  source 1..22: mol_type = other DNA
ctggtcgagttgcaaaaggcca

SEQ ID NO: 2580 - DNA, 22 bp, synthetic construct
  misc_feature 1..22: note = Synthetic
  source 1..22: mol_type = other DNA
gccaaagctgctttttttctgg

SEQ ID NO: 2581 - DNA, 22 bp, synthetic construct
  misc_feature 1..22: note = Synthetic
  source 1..22: mol_type = other DNA
catctgccaaagctgctttttt

SEQ ID NO: 2582 - DNA, 22 bp, synthetic construct
  misc_feature 1..22: note = Synthetic
  source 1..22: mol_type = other DNA
caggtacaggagtctaaagcac

SEQ ID NO: 2583 - DNA, 22 bp, synthetic construct
  misc_feature 1..22: note = Synthetic
  source 1..22: mol_type = other DNA
gtttttgctctttatcaggtac

SEQ ID NO: 2584 - DNA, 22 bp, synthetic construct
  misc_feature 1..22: note = Synthetic
  source 1..22: mol_type = other DNA
tttccatgttgtccccctctaa

SEQ ID NO: 2585 - DNA, 22 bp, synthetic construct
  misc_feature 1..22: note = Synthetic
  source 1..22: mol_type = other DNA
ccctctaagacagtctgcactg

SEQ ID NO: 2586 - DNA, 22 bp, synthetic construct
  misc_feature 1..22: note = Synthetic
  source 1..22: mol_type = other DNA
tgcactggcaggtagcccattc

SEQ ID NO: 2587 - DNA, 22 bp, synthetic construct
  misc_feature 1..22: note = Synthetic
  source 1..22: mol_type = other DNA
tagcccattcggggatgcttcg

SEQ ID NO: 2588 - DNA, 22 bp, synthetic construct
  misc_feature 1..22: note = Synthetic
  source 1..22: mol_type = other DNA
ggggatgcttcgcaaaatacct

SEQ ID NO: 2589 - DNA, 22 bp, synthetic construct
  misc_feature 1..22: note = Synthetic
  source 1..22: mol_type = other DNA
cttcgcaaaataccttttggtt

SEQ ID NO: 2590 - DNA, 22 bp, synthetic construct
  misc_feature 1..22: note = Synthetic
  source 1..22: mol_type = other DNA
ccttttggttcgaaatttgttt

SEQ ID NO: 2591 - DNA, 22 bp, synthetic construct
  misc_feature 1..22: note = Synthetic
  source 1..22: mol_type = other DNA
aatttgttttttagtaccttgg

SEQ ID NO: 2592 - DNA, 22 bp, synthetic construct
  misc_feature 1..22: note = Synthetic
  source 1..22: mol_type = other DNA
ggcaaagtctcgaacatcttct

SEQ ID NO: 2593 - DNA, 22 bp, synthetic construct
  misc_feature 1..22: note = Synthetic
  source 1..22: mol_type = other DNA
agtctcgaacatcttctcctga

SEQ ID NO: 2594 - DNA, 22 bp, synthetic construct
  misc_feature 1..22: note = Synthetic
  source 1..22: mol_type = other DNA
agggggacaacatggaaacgtg

SEQ ID NO: 2595 - DNA, 22 bp, synthetic construct
  misc_feature 1..22: note = Synthetic
  source 1..22: mol_type = other DNA
tagagggggacaacatggaaac

SEQ ID NO: 2596 - DNA, 22 bp, synthetic construct
  misc_feature 1..22: note = Synthetic
  source 1..22: mol_type = other DNA
agcatccccgaatgggctacct

SEQ ID NO: 2597 - DNA, 22 bp, synthetic construct
  misc_feature 1..22: note = Synthetic
  source 1..22: mol_type = other DNA
aaaggtattttgcgaagcatcc

SEQ ID NO: 2598 - DNA, 22 bp, synthetic construct
  misc_feature 1..22: note = Synthetic
  source 1..22: mol_type = other DNA
ctaaaaaacaaatttcgaacca

SEQ ID NO: 2599 - DNA, 22 bp, synthetic construct
  misc_feature 1..22: note = Synthetic
  source 1..22: mol_type = other DNA
gactttgccaaggtactaaaaa

SEQ ID NO: 2600 - DNA, 22 bp, synthetic construct
  misc_feature 1..22: note = Synthetic
  source 1..22: mol_type = other DNA
gagaagatgttcgagactttgc

SEQ ID NO: 2601 - DNA, 22 bp, synthetic construct
  misc_feature 1..22: note = Synthetic
  source 1..22: mol_type = other DNA
tcccttttagactacatcagga

SEQ ID NO: 2602 - DNA, 22 bp, synthetic construct
  misc_feature 1..22: note = Synthetic
  source 1..22: mol_type = other DNA
actcacgcagaatctactggcc

SEQ ID NO: 2603 - DNA, 22 bp, synthetic construct
  misc_feature 1..22: note = Synthetic
  source 1..22: mol_type = other DNA
acgcagaatctactggccagaa

SEQ ID NO: 2604 - DNA, 22 bp, synthetic construct
  misc_feature 1..22: note = Synthetic
  source 1..22: mol_type = other DNA
aatctactggccagaagttgat

SEQ ID NO: 2605 - DNA, 22 bp, synthetic construct
  misc_feature 1..22: note = Synthetic
  source 1..22: mol_type = other DNA
acttctggccagtagattctgc

SEQ ID NO: 2606 - DNA, 22 bp, synthetic construct
  misc_feature 1..22: note = Synthetic
  source 1..22: mol_type = other DNA
tactctgatcaacttctggcca

SEQ ID NO: 2607 - DNA, 22 bp, synthetic construct
  misc_feature 1..22: note = Synthetic
  source 1..22: mol_type = other DNA
ccgttactctgatcaacttctg

SEQ ID NO: 2608 - DNA, 22 bp, synthetic construct
  misc_feature 1..22: note = Synthetic
  source 1..22: mol_type = other DNA
ttttgttttgcagtcccgttac

SEQ ID NO: 2609 - DNA, 22 bp, synthetic construct
  misc_feature 1..22: note = Synthetic
  source 1..22: mol_type = other DNA
caactagtctcatacctgctag

SEQ ID NO: 2610 - DNA, 22 bp, synthetic construct
  misc_feature 1..22: note = Synthetic
  source 1..22: mol_type = other DNA
tctcatacctgctagcataatg

SEQ ID NO: 2611 - DNA, 22 bp, synthetic construct
  misc_feature 1..22: note = Synthetic
  source 1..22: mol_type = other DNA
ctgctagcataatgttcaatgc

SEQ ID NO: 2612 - DNA, 22 bp, synthetic construct
  misc_feature 1..22: note = Synthetic
  source 1..22: mol_type = other DNA
tagcataatgttcaatgcgtga

SEQ ID NO: 2613 - DNA, 22 bp, synthetic construct
  misc_feature 1..22: note = Synthetic
  source 1..22: mol_type = other DNA
tcacgcattgaacattatgcta

SEQ ID NO: 2614 - DNA, 22 bp, synthetic construct
  misc_feature 1..22: note = Synthetic
  source 1..22: mol_type = other DNA
ctcgtcccctcagctttcacac

SEQ ID NO: 2615 - DNA, 22 bp, synthetic construct
  misc_feature 1..22: note = Synthetic
  source 1..22: mol_type = other DNA
tgcctcgtcccctcagctttca

SEQ ID NO: 2616 - DNA, 22 bp, synthetic construct
  misc_feature 1..22: note = Synthetic
  source 1..22: mol_type = other DNA
atacttacatgctctcattagg

SEQ ID NO: 2617 - DNA, 22 bp, synthetic construct
  misc_feature 1..22: note = Synthetic
  source 1..22: mol_type = other DNA
tcattaggagagatgctatcat

SEQ ID NO: 2618 - DNA, 22 bp, synthetic construct
  misc_feature 1..22: note = Synthetic
  source 1..22: mol_type = other DNA
aggagagatgctatcatttaga

SEQ ID NO: 2619 - DNA, 22 bp, synthetic construct
  misc_feature 1..22: note = Synthetic
  source 1..22: mol_type = other DNA
tgctgttttccatttctgctag

SEQ ID NO: 2620 - DNA, 22 bp, synthetic construct
  misc_feature 1..22: note = Synthetic
  source 1..22: mol_type = other DNA
gcatctctcctaatgagagcat

SEQ ID NO: 2621 - DNA, 22 bp, synthetic construct
  misc_feature 1..22: note = Synthetic
  source 1..22: mol_type = other DNA
ttatctaaatgatagcatctct

SEQ ID NO: 2622 - DNA, 22 bp, synthetic construct
  misc_feature 1..22: note = Synthetic
  source 1..22: mol_type = other DNA
aaacagcaatggatcttatcta

SEQ ID NO: 2623 - DNA, 22 bp, synthetic construct
  misc_feature 1..22: note = Synthetic
  source 1..22: mol_type = other DNA
ggaaaacagcaatggatcttat

SEQ ID NO: 2624 - DNA, 22 bp, synthetic construct
  misc_feature 1..22: note = Synthetic
  source 1..22: mol_type = other DNA
ctagcagaaatggaaaacagca

SEQ ID NO: 2625 - DNA, 22 bp, synthetic construct
  misc_feature 1..22: note = Synthetic
  source 1..22: mol_type = other DNA
caggctagcagaaatggaaaac

SEQ ID NO: 2626 - DNA, 22 bp, synthetic construct
  misc_feature 1..22: note = Synthetic
  source 1..22: mol_type = other DNA
ttacgttttttatcaggctagc

SEQ ID NO: 2627 - DNA, 22 bp, synthetic construct
  misc_feature 1..22: note = Synthetic
  source 1..22: mol_type = other DNA
aaaactcacctgttttcttcct

SEQ ID NO: 2628 - DNA, 22 bp, synthetic construct
  misc_feature 1..22: note = Synthetic
  source 1..22: mol_type = other DNA
tgttttcttcctcaagatctgc

SEQ ID NO: 2629 - DNA, 22 bp, synthetic construct
  misc_feature 1..22: note = Synthetic
  source 1..22: mol_type = other DNA
cccctctttcctcactctctaa

SEQ ID NO: 2630 - DNA, 22 bp, synthetic construct
  misc_feature 1..22: note = Synthetic
  source 1..22: mol_type = other DNA
tttcctcactctctaaggaaat

SEQ ID NO: 2631 - DNA, 22 bp, synthetic construct
  misc_feature 1..22: note = Synthetic
  source 1..22: mol_type = other DNA
ggactacgaggctggctcaggg

SEQ ID NO: 2632 - DNA, 22 bp, synthetic construct
  misc_feature 1..22: note = Synthetic
  source 1..22: mol_type = other DNA
cgaggctggctcaggggggagt

SEQ ID NO: 2633 - DNA, 22 bp, synthetic construct
  misc_feature 1..22: note = Synthetic
  source 1..22: mol_type = other DNA
ggggagtcctggttcaaacttt

SEQ ID NO: 2634 - DNA, 22 bp, synthetic construct
  misc_feature 1..22: note = Synthetic
  source 1..22: mol_type = other DNA
gagtcctggttcaaactttggc

SEQ ID NO: 2635 - DNA, 22 bp, synthetic construct
  misc_feature 1..22: note = Synthetic
  source 1..22: mol_type = other DNA
ggttcaaactttggcagtaatg

SEQ ID NO: 2636 - DNA, 22 bp, synthetic construct
  misc_feature 1..22: note = Synthetic
  source 1..22: mol_type = other DNA
ctttggcagtaatgctggatta

SEQ ID NO: 2637 - DNA, 22 bp, synthetic construct
  misc_feature 1..22: note = Synthetic
  source 1..22: mol_type = other DNA
cagatcttgaggaagaaaacag

SEQ ID NO: 2638 - DNA, 22 bp, synthetic construct
  misc_feature 1..22: note = Synthetic
  source 1..22: mol_type = other DNA
ctagcagatcttgaggaagaaa

SEQ ID NO: 2639 - DNA, 22 bp, synthetic construct
  misc_feature 1..22: note = Synthetic
  source 1..22: mol_type = other DNA
aggggagctagagagaatccta

SEQ ID NO: 2640 - DNA, 22 bp, synthetic construct
  misc_feature 1..22: note = Synthetic
  source 1..22: mol_type = other DNA
gtgaggaaagaggggagctaga

SEQ ID NO: 2641 - DNA, 22 bp, synthetic construct
  misc_feature 1..22: note = Synthetic
  source 1..22: mol_type = other DNA
tgcccagatcttgatttcctta

SEQ ID NO: 2642 - DNA, 22 bp, synthetic construct
  misc_feature 1..22: note = Synthetic
  source 1..22: mol_type = other DNA
agcctcgtagtcctgcccagat

SEQ ID NO: 2643 - DNA, 22 bp, synthetic construct
  misc_feature 1..22: note = Synthetic
  source 1..22: mol_type = other DNA
tgagccagcctcgtagtcctgc

SEQ ID NO: 2644 - DNA, 22 bp, synthetic construct
  misc_feature 1..22: note = Synthetic
  source 1..22: mol_type = other DNA
ggactcccccctgagccagcct

SEQ ID NO: 2645 - DNA, 22 bp, synthetic construct
  misc_feature 1..22: note = Synthetic
  source 1..22: mol_type = other DNA
tttgttaatccagcattactgc

SEQ ID NO: 2646 - DNA, 22 bp, synthetic construct
  misc_feature 1..22: note = Synthetic
  source 1..22: mol_type = other DNA
tttccagagatgatgaacattt

SEQ ID NO: 2647 - DNA, 22 bp, synthetic construct
  misc_feature 1..22: note = Synthetic
  source 1..22: mol_type = other DNA
aactgtgactccagctgtttat

SEQ ID NO: 2648 - DNA, 22 bp, synthetic construct
  misc_feature 1..22: note = Synthetic
  source 1..22: mol_type = other DNA
ccagctgtttattgtggtcttc

SEQ ID NO: 2649 - DNA, 22 bp, synthetic construct
  misc_feature 1..22: note = Synthetic
  source 1..22: mol_type = other DNA
ttccaggcggcctttgtgttga

SEQ ID NO: 2650 - DNA, 22 bp, synthetic construct
  misc_feature 1..22: note = Synthetic
  source 1..22: mol_type = other DNA
gttgacgcagtagcttggcctc

SEQ ID NO: 2651 - DNA, 22 bp, synthetic construct
  misc_feature 1..22: note = Synthetic
  source 1..22: mol_type = other DNA
cagcatcccggggactctgggg

SEQ ID NO: 2652 - DNA, 22 bp, synthetic construct
  misc_feature 1..22: note = Synthetic
  source 1..22: mol_type = other DNA
gggcatcatttcaggaggggac

SEQ ID NO: 2653 - DNA, 22 bp, synthetic construct
  misc_feature 1..22: note = Synthetic
  source 1..22: mol_type = other DNA
ttatgttcgtgctgctgcttta

SEQ ID NO: 2654 - DNA, 22 bp, synthetic construct
  misc_feature 1..22: note = Synthetic
  source 1..22: mol_type = other DNA
tttagacggtcatattctgctt

SEQ ID NO: 2655 - DNA, 22 bp, synthetic construct
  misc_feature 1..22: note = Synthetic
  source 1..22: mol_type = other DNA
acaggctaaggcagctgctgga

SEQ ID NO: 2656 - DNA, 22 bp, synthetic construct
  misc_feature 1..22: note = Synthetic
  source 1..22: mol_type = other DNA
gaccacaataaacagctggagt

SEQ ID NO: 2657 - DNA, 22 bp, synthetic construct
  misc_feature 1..22: note = Synthetic
  source 1..22: mol_type = other DNA
ctggaagaccacaataaacagc

SEQ ID NO: 2658 - DNA, 22 bp, synthetic construct
  misc_feature 1..22: note = Synthetic
  source 1..22: mol_type = other DNA
caggatgcaaatcctggaagac

SEQ ID NO: 2659 - DNA, 22 bp, synthetic construct
  misc_feature 1..22: note = Synthetic
  source 1..22: mol_type = other DNA
aaggccgcctggaagccaggat

SEQ ID NO: 2660 - DNA, 22 bp, synthetic construct
  misc_feature 1..22: note = Synthetic
  source 1..22: mol_type = other DNA
aacacaaaggccgcctggaagc

SEQ ID NO: 2661 - DNA, 22 bp, synthetic construct
  misc_feature 1..22: note = Synthetic
  source 1..22: mol_type = other DNA
gcccacctctccccagagtccc

SEQ ID NO: 2662 - DNA, 22 bp, synthetic construct
  misc_feature 1..22: note = Synthetic
  source 1..22: mol_type = other DNA
tgaaatgatgcccacctctccc

SEQ ID NO: 2663 - DNA, 22 bp, synthetic construct
  misc_feature 1..22: note = Synthetic
  source 1..22: mol_type = other DNA
ccccactgccgtcccctcctga

SEQ ID NO: 2664 - DNA, 22 bp, synthetic construct
  misc_feature 1..22: note = Synthetic
  source 1..22: mol_type = other DNA
tgtccccactgccgtcccctcc

SEQ ID NO: 2665 - DNA, 22 bp, synthetic construct
  misc_feature 1..22: note = Synthetic
  source 1..22: mol_type = other DNA
gatgccaataggaatctgcaag

SEQ ID NO: 2666 - DNA, 22 bp, synthetic construct
  misc_feature 1..22: note = Synthetic
  source 1..22: mol_type = other DNA
gagtagctaggacacttaccca

SEQ ID NO: 2667 - DNA, 22 bp, synthetic construct
  misc_feature 1..22: note = Synthetic
  source 1..22: mol_type = other DNA
taggacacttacccatggagtc

SEQ ID NO: 2668 - DNA, 22 bp, synthetic construct
  misc_feature 1..22: note = Synthetic
  source 1..22: mol_type = other DNA
gactgctgtcggacctctgtag

SEQ ID NO: 2669 - DNA, 22 bp, synthetic construct
  misc_feature 1..22: note = Synthetic
  source 1..22: mol_type = other DNA
tcactttggcctctgcctgggg

SEQ ID NO: 2670 - DNA, 22 bp, synthetic construct
  misc_feature 1..22: note = Synthetic
  source 1..22: mol_type = other DNA
agtcaaacttcggactccatgg

SEQ ID NO: 2671 - DNA, 22 bp, synthetic construct
  misc_feature 1..22: note = Synthetic
  source 1..22: mol_type = other DNA
tggcagtcaaacttcggactcc

SEQ ID NO: 2672 - DNA, 22 bp, synthetic construct
  misc_feature 1..22: note = Synthetic
  source 1..22: mol_type = other DNA
gcctatgctgctccgagtggtt

SEQ ID NO: 2673 - DNA, 22 bp, synthetic construct
  misc_feature 1..22: note = Synthetic
  source 1..22: mol_type = other DNA
gcagtcagcctatgctgctccg

SEQ ID NO: 2674 - DNA, 22 bp, synthetic construct
  misc_feature 1..22: note = Synthetic
  source 1..22: mol_type = other DNA
acagcagtcagcctatgctgct

SEQ ID NO: 2675 - DNA, 22 bp, synthetic construct
  misc_feature 1..22: note = Synthetic
  source 1..22: mol_type = other DNA
tacctctctacagaggtccgac

SEQ ID NO: 2676 - DNA, 22 bp, synthetic construct
  misc_feature 1..22: note = Synthetic
  source 1..22: mol_type = other DNA
tcctctccttctacctctctac

SEQ ID NO: 2677 - DNA, 22 bp, synthetic construct
  misc_feature 1..22: note = Synthetic
  source 1..22: mol_type = other DNA
cagaggccaaagtgaatggcac

SEQ ID NO: 2678 - DNA, 22 bp, synthetic construct
  misc_feature 1..22: note = Synthetic
  source 1..22: mol_type = other DNA
ttagccccaggcagaggccaaa

SEQ ID NO: 2679 - DNA, 22 bp, synthetic construct
  misc_feature 1..22: note = Synthetic
  source 1..22: mol_type = other DNA
tgacttagccccaggcagaggc

SEQ ID NO: 2680 - DNA, 22 bp, synthetic construct
  misc_feature 1..22: note = Synthetic
  source 1..22: mol_type = other DNA
agcttacctcttgaactaggga

SEQ ID NO: 2681 - DNA, 22 bp, synthetic construct
  misc_feature 1..22: note = Synthetic
  source 1..22: mol_type = other DNA
tcttgaactagggaaggagttg

SEQ ID NO: 2682 - DNA, 22 bp, synthetic construct
  misc_feature 1..22: note = Synthetic
  source 1..22: mol_type = other DNA
cttgtgtcctggggaggactga

SEQ ID NO: 2683 - DNA, 22 bp, synthetic construct
  misc_feature 1..22: note = Synthetic
  source 1..22: mol_type = other DNA
ggactgagaagatcttcctcac

SEQ ID NO: 2684 - DNA, 22 bp, synthetic construct
  misc_feature 1..22: note = Synthetic
  source 1..22: mol_type = other DNA
caacaactccttccctagttca

SEQ ID NO: 2685 - DNA, 22 bp, synthetic construct
  misc_feature 1..22: note = Synthetic
  source 1..22: mol_type = other DNA
ggagcaactcaacaactccttc

SEQ ID NO: 2686 - DNA, 22 bp, synthetic construct
  misc_feature 1..22: note = Synthetic
  source 1..22: mol_type = other DNA
acacaagcacagggttagagga

SEQ ID NO: 2687 - DNA, 22 bp, synthetic construct
  misc_feature 1..22: note = Synthetic
  source 1..22: mol_type = other DNA
aggacacaagcacagggttaga

SEQ ID NO: 2688 - DNA, 22 bp, synthetic construct
  misc_feature 1..22: note = Synthetic
  source 1..22: mol_type = other DNA
agtcctccccaggacacaagca

SEQ ID NO: 2689 - DNA, 22 bp, synthetic construct
  misc_feature 1..22: note = Synthetic
  source 1..22: mol_type = other DNA
ttattaaggtgaggaagatctt

SEQ ID NO: 2690 - DNA, 22 bp, synthetic construct
  misc_feature 1..22: note = Synthetic
  source 1..22: mol_type = other DNA
tttttgcttttattaaggtgag

SEQ ID NO: 2691 - DNA, 22 bp, synthetic construct
  misc_feature 1..22: note = Synthetic
  source 1..22: mol_type = other DNA
taacctctctcattggctttcc

SEQ ID NO: 2692 - DNA, 22 bp, synthetic construct
  misc_feature 1..22: note = Synthetic
  source 1..22: mol_type = other DNA
gctttccaggggtatttcttcc

SEQ ID NO: 2693 - DNA, 22 bp, synthetic construct
  misc_feature 1..22: note = Synthetic
  source 1..22: mol_type = other DNA
ccctggaaagccaatgagagag

SEQ ID NO: 2694 - DNA, 22 bp, synthetic construct
  misc_feature 1..22: note = Synthetic
  source 1..22: mol_type = other DNA
atacccctggaaagccaatgag

SEQ ID NO: 2695 - DNA, 22 bp, synthetic construct
  misc_feature 1..22: note = Synthetic
  source 1..22: mol_type = other DNA
aaggaagaaatacccctggaaa

SEQ ID NO: 2696 - DNA, 22 bp, synthetic construct
  misc_feature 1..22: note = Synthetic
  source 1..22: mol_type = other DNA
gtaacataactgcgtgctttat

SEQ ID NO: 2697 - DNA, 22 bp, synthetic construct
  misc_feature 1..22: note = Synthetic
  source 1..22: mol_type = other DNA
aactgcgtgctttattgagata

SEQ ID NO: 2698 - DNA, 22 bp, synthetic construct
  misc_feature 1..22: note = Synthetic
  source 1..22: mol_type = other DNA
gctttattgagatacacagtaa

SEQ ID NO: 2699 - DNA, 22 bp, synthetic construct
  misc_feature 1..22: note = Synthetic
  source 1..22: mol_type = other DNA
gagatacacagtaaagcagtac

SEQ ID NO: 2700 - DNA, 22 bp, synthetic construct
  misc_feature 1..22: note = Synthetic
  source 1..22: mol_type = other DNA
acacagtaaagcagtactataa

SEQ ID NO: 2701 - DNA, 22 bp, synthetic construct
  misc_feature 1..22: note = Synthetic
  source 1..22: mol_type = other DNA
cagtaaagcagtactataatac

SEQ ID NO: 2702 - DNA, 22 bp, synthetic construct
  misc_feature 1..22: note = Synthetic
  source 1..22: mol_type = other DNA
taatacaatagtaaggcatata

SEQ ID NO: 2703 - DNA, 22 bp, synthetic construct
  misc_feature 1..22: note = Synthetic
  source 1..22: mol_type = other DNA
caatagtaaggcatatatttgg

SEQ ID NO: 2704 - DNA, 22 bp, synthetic construct
  misc_feature 1..22: note = Synthetic
  source 1..22: mol_type = other DNA
gtaaggcatatatttggtgaag

SEQ ID NO: 2705 - DNA, 22 bp, synthetic construct
  misc_feature 1..22: note = Synthetic
  source 1..22: mol_type = other DNA
ttggtgaagtctgatatgttgt

SEQ ID NO: 2706 - DNA, 22 bp, synthetic construct
  misc_feature 1..22: note = Synthetic
  source 1..22: mol_type = other DNA
gaagtctgatatgttgtgaaaa

SEQ ID NO: 2707 - DNA, 22 bp, synthetic construct
  misc_feature 1..22: note = Synthetic
  source 1..22: mol_type = other DNA
tgttgtgaaaatgcagtaaaac

SEQ ID NO: 2708 - DNA, 22 bp, synthetic construct
  misc_feature 1..22: note = Synthetic
  source 1..22: mol_type = other DNA
atgcagtaaaactgaagtttaa

SEQ ID NO: 2709 - DNA, 22 bp, synthetic construct
  misc_feature 1..22: note = Synthetic
  source 1..22: mol_type = other DNA
cagtaaaactgaagtttaaaaa

SEQ ID NO: 2710 - DNA, 22 bp, synthetic construct
  misc_feature 1..22: note = Synthetic
  source 1..22: mol_type = other DNA
ctgaagtttaaaaaaataattc

SEQ ID NO: 2711 - DNA, 22 bp, synthetic construct
  misc_feature 1..22: note = Synthetic
  source 1..22: mol_type = other DNA
taaaaaaataattcgtaaatgt

SEQ ID NO: 2712 - DNA, 22 bp, synthetic construct
  misc_feature 1..22: note = Synthetic
  source 1..22: mol_type = other DNA
aataattcgtaaatgttacagt

SEQ ID NO: 2713 - DNA, 22 bp, synthetic construct
  misc_feature 1..22: note = Synthetic
  source 1..22: mol_type = other DNA
tgttacagtgttggtgttaaaa

SEQ ID NO: 2714 - DNA, 22 bp, synthetic construct
  misc_feature 1..22: note = Synthetic
  source 1..22: mol_type = other DNA
ttggtgttaaaacacaatatat

SEQ ID NO: 2715 - DNA, 22 bp, synthetic construct
  misc_feature 1..22: note = Synthetic
  source 1..22: mol_type = other DNA
aaaacacaatatattatgatac

SEQ ID NO: 2716 - DNA, 22 bp, synthetic construct
  misc_feature 1..22: note = Synthetic
  source 1..22: mol_type = other DNA
tattatgatactcaagtaagaa

SEQ ID NO: 2717 - DNA, 22 bp, synthetic construct
  misc_feature 1..22: note = Synthetic
  source 1..22: mol_type = other DNA
aagtaagaactcagtacctgaa

SEQ ID NO: 2718 - DNA, 22 bp, synthetic construct
  misc_feature 1..22: note = Synthetic
  source 1..22: mol_type = other DNA
aaaacaatgacaaaacatgcca

SEQ ID NO: 2719 - DNA, 22 bp, synthetic construct
  misc_feature 1..22: note = Synthetic
  source 1..22: mol_type = other DNA
acatgccatgtgatgtttatgc

SEQ ID NO: 2720 - DNA, 22 bp, synthetic construct
  misc_feature 1..22: note = Synthetic
  source 1..22: mol_type = other DNA
gatgtttatgcttcagttacat

SEQ ID NO: 2721 - DNA, 22 bp, synthetic construct
  misc_feature 1..22: note = Synthetic
  source 1..22: mol_type = other DNA
atgcttcagttacattatgatt

SEQ ID NO: 2722 - DNA, 22 bp, synthetic construct
  misc_feature 1..22: note = Synthetic
  source 1..22: mol_type = other DNA
tcagttacattatgatttacag

SEQ ID NO: 2723 - DNA, 22 bp, synthetic construct
  misc_feature 1..22: note = Synthetic
  source 1..22: mol_type = other DNA
cattatgatttacagtttaata

SEQ ID NO: 2724 - DNA, 22 bp, synthetic construct
  misc_feature 1..22: note = Synthetic
  source 1..22: mol_type = other DNA
tatgatttacagtttaatactt

SEQ ID NO: 2725 - DNA, 22 bp, synthetic construct
  misc_feature 1..22: note = Synthetic
  source 1..22: mol_type = other DNA
ggtggttataaagaacacaaca

SEQ ID NO: 2726 - DNA, 22 bp, synthetic construct
  misc_feature 1..22: note = Synthetic
  source 1..22: mol_type = other DNA
ggttataaagaacacaacacga

SEQ ID NO: 2727 - DNA, 22 bp, synthetic construct
  misc_feature 1..22: note = Synthetic
  source 1..22: mol_type = other DNA
agaacacaacacgaaataatgt

SEQ ID NO: 2728 - DNA, 22 bp, synthetic construct
  misc_feature 1..22: note = Synthetic
  source 1..22: mol_type = other DNA
cacaacacgaaataatgtccaa

SEQ ID NO: 2729 - DNA, 22 bp, synthetic construct
  misc_feature 1..22: note = Synthetic
  source 1..22: mol_type = other DNA
taatgtccaaattaattatgct

SEQ ID NO: 2730 - DNA, 22 bp, synthetic construct
  misc_feature 1..22: note = Synthetic
  source 1..22: mol_type = other DNA
aaattaattatgcttaaaatgc

SEQ ID NO: 2731 - DNA, 22 bp, synthetic construct
  misc_feature 1..22: note = Synthetic
  source 1..22: mol_type = other DNA
cttaaaatgcagcaataaagct

SEQ ID NO: 2732 - DNA, 22 bp, synthetic construct
  misc_feature 1..22: note = Synthetic
  source 1..22: mol_type = other DNA
caataaagctctcaatttttgt

SEQ ID NO: 2733 - DNA, 22 bp, synthetic construct
  misc_feature 1..22: note = Synthetic
  source 1..22: mol_type = other DNA
attatgacagactcactccaga

SEQ ID NO: 2734 - DNA, 22 bp, synthetic construct
  misc_feature 1..22: note = Synthetic
  source 1..22: mol_type = other DNA
aatgtgtctaaaagaaaaacaa

SEQ ID NO: 2735 - DNA, 22 bp, synthetic construct
  misc_feature 1..22: note = Synthetic
  source 1..22: mol_type = other DNA
aagaaaaacaaaaagattaaaa

SEQ ID NO: 2736 - DNA, 22 bp, synthetic construct
  misc_feature 1..22: note = Synthetic
  source 1..22: mol_type = other DNA
ttatttatgcactctatttacc

SEQ ID NO: 2737 - DNA, 22 bp, synthetic construct
  misc_feature 1..22: note = Synthetic
  source 1..22: mol_type = other DNA
gcactctatttacctctgattt

SEQ ID NO: 2738 - DNA, 22 bp, synthetic construct
  misc_feature 1..22: note = Synthetic
  source 1..22: mol_type = other DNA
tgaaacttacttacttaaactt

SEQ ID NO: 2739 - DNA, 22 bp, synthetic construct
  misc_feature 1..22: note = Synthetic
  source 1..22: mol_type = other DNA
cttacttacttaaacttcttag

SEQ ID NO: 2740 - DNA, 22 bp, synthetic construct
  misc_feature 1..22: note = Synthetic
  source 1..22: mol_type = other DNA
acttaaacttcttagtaggatg

SEQ ID NO: 2741 - DNA, 22 bp, synthetic construct
  misc_feature 1..22: note = Synthetic
  source 1..22: mol_type = other DNA
ggatgtaaagtaaccccttgtt

SEQ ID NO: 2742 - DNA, 22 bp, synthetic construct
  misc_feature 1..22: note = Synthetic
  source 1..22: mol_type = other DNA
aaagtaaccccttgttttaaat

SEQ ID NO: 2743 - DNA, 22 bp, synthetic construct
  misc_feature 1..22: note = Synthetic
  source 1..22: mol_type = other DNA
ccttgttttaaatctgagtttt

SEQ ID NO: 2744 - DNA, 22 bp, synthetic construct
  misc_feature 1..22: note = Synthetic
  source 1..22: mol_type = other DNA
taaatctgagttttaaaaatcc

SEQ ID NO: 2745 - DNA, 22 bp, synthetic construct
  misc_feature 1..22: note = Synthetic
  source 1..22: mol_type = other DNA
tttaaaaatccttgggtaaaga

SEQ ID NO: 2746 - DNA, 22 bp, synthetic construct
  misc_feature 1..22: note = Synthetic
  source 1..22: mol_type = other DNA
ggtccagcgtcacataaaggaa

SEQ ID NO: 2747 - DNA, 22 bp, synthetic construct
  misc_feature 1..22: note = Synthetic
  source 1..22: mol_type = other DNA
ggaaaaaaatgcaagacaaaaa

SEQ ID NO: 2748 - DNA, 22 bp, synthetic construct
  misc_feature 1..22: note = Synthetic
  source 1..22: mol_type = other DNA
caagacaaaaaccaaatcttca

SEQ ID NO: 2749 - DNA, 22 bp, synthetic construct
  misc_feature 1..22: note = Synthetic
  source 1..22: mol_type = other DNA
caaaaaccaaatcttcatgtaa

SEQ ID NO: 2750 - DNA, 22 bp, synthetic construct
  misc_feature 1..22: note = Synthetic
  source 1..22: mol_type = other DNA
aaaccaaatcttcatgtaattt

SEQ ID NO: 2751 - DNA, 22 bp, synthetic construct
  misc_feature 1..22: note = Synthetic
  source 1..22: mol_type = other DNA
ggtaatttgttaccttagagct

SEQ ID NO: 2752 - DNA, 22 bp, synthetic construct
  misc_feature 1..22: note = Synthetic
  source 1..22: mol_type = other DNA
ttagagctttgggttttctttt

SEQ ID NO: 2753 - DNA, 22 bp, synthetic construct
  misc_feature 1..22: note = Synthetic
  source 1..22: mol_type = other DNA
tgaaaattatgaaggaaaaaga

SEQ ID NO: 2754 - DNA, 22 bp, synthetic construct
  misc_feature 1..22: note = Synthetic
  source 1..22: mol_type = other DNA
agaaagaattataaaggaaaaa

SEQ ID NO: 2755 - DNA, 22 bp, synthetic construct
  misc_feature 1..22: note = Synthetic
  source 1..22: mol_type = other DNA
ttataaaggaaaaagaaaataa

SEQ ID NO: 2756 - DNA, 22 bp, synthetic construct
  misc_feature 1..22: note = Synthetic
  source 1..22: mol_type = other DNA
gaaaaagaaaataacgcaatgg

SEQ ID NO: 2757 - DNA, 22 bp, synthetic construct
  misc_feature 1..22: note = Synthetic
  source 1..22: mol_type = other DNA
aaagaaaataacgcaatggaca

SEQ ID NO: 2758 - DNA, 22 bp, synthetic construct
  misc_feature 1..22: note = Synthetic
  source 1..22: mol_type = other DNA
gacaagtggtgaagctgtgaac

SEQ ID NO: 2759 - DNA, 22 bp, synthetic construct
  misc_feature 1..22: note = Synthetic
  source 1..22: mol_type = other DNA
tgaagctgtgaactcaggtgtg

SEQ ID NO: 2760 - DNA, 22 bp, synthetic construct
  misc_feature 1..22: note = Synthetic
  source 1..22: mol_type = other DNA
attatcaggaacaccccaaaac

SEQ ID NO: 2761 - DNA, 22 bp, synthetic construct
  misc_feature 1..22: note = Synthetic
  source 1..22: mol_type = other DNA
caggaacaccccaaaaccaaag

SEQ ID NO: 2762 - DNA, 22 bp, synthetic construct
  misc_feature 1..22: note = Synthetic
  source 1..22: mol_type = other DNA
caccccaaaaccaaagtgaggt

SEQ ID NO: 2763 - DNA, 22 bp, synthetic construct
  misc_feature 1..22: note = Synthetic
  source 1..22: mol_type = other DNA
agaaatagcatgagaagccgtg

SEQ ID NO: 2764 - DNA, 22 bp, synthetic construct
  misc_feature 1..22: note = Synthetic
  source 1..22: mol_type = other DNA
agcatgagaagccgtgtttgat

SEQ ID NO: 2765 - DNA, 22 bp, synthetic construct
  misc_feature 1..22: note = Synthetic
  source 1..22: mol_type = other DNA
tgagaagccgtgtttgatgtta

SEQ ID NO: 2766 - DNA, 22 bp, synthetic construct
  misc_feature 1..22: note = Synthetic
  source 1..22: mol_type = other DNA
aagccgtgtttgatgttaatta

SEQ ID NO: 2767 - DNA, 22 bp, synthetic construct
  misc_feature 1..22: note = Synthetic
  source 1..22: mol_type = other DNA
gtttgatgttaattaattaatt

SEQ ID NO: 2768 - DNA, 22 bp, synthetic construct
  misc_feature 1..22: note = Synthetic
  source 1..22: mol_type = other DNA
tgatgttaattaattaattatt

SEQ ID NO: 2769 - DNA, 22 bp, synthetic construct
  misc_feature 1..22: note = Synthetic
  source 1..22: mol_type = other DNA
ggacaaaacccactctccaaaa

SEQ ID NO: 2770 - DNA, 22 bp, synthetic construct
  misc_feature 1..22: note = Synthetic
  source 1..22: mol_type = other DNA
cactctccaaaagctaattaca

SEQ ID NO: 2771 - DNA, 22 bp, synthetic construct
  misc_feature 1..22: note = Synthetic
  source 1..22: mol_type = other DNA
gatgtcagcccactctccaaaa

SEQ ID NO: 2772 - DNA, 22 bp, synthetic construct
  misc_feature 1..22: note = Synthetic
  source 1..22: mol_type = other DNA
cactctccaaaagctaattaca

SEQ ID NO: 2773 - DNA, 22 bp, synthetic construct
  misc_feature 1..22: note = Synthetic
  source 1..22: mol_type = other DNA
aaagctaattacacttgatgtc

SEQ ID NO: 2774 - DNA, 22 bp, synthetic construct
  misc_feature 1..22: note = Synthetic
  source 1..22: mol_type = other DNA
attacacttgatgtcagaggta

SEQ ID NO: 2775 - DNA, 22 bp, synthetic construct
  misc_feature 1..22: note = Synthetic
  source 1..22: mol_type = other DNA
gatgtcagaggtaacagatttg

SEQ ID NO: 2776 - DNA, 22 bp, synthetic construct
  misc_feature 1..22: note = Synthetic
  source 1..22: mol_type = other DNA
gaggtaacagatttgcaaaatt

SEQ ID NO: 2777 - DNA, 22 bp, synthetic construct
  misc_feature 1..22: note = Synthetic
  source 1..22: mol_type = other DNA
agatttgcaaaattataggtca

SEQ ID NO: 2778 - DNA, 22 bp, synthetic construct
  misc_feature 1..22: note = Synthetic
  source 1..22: mol_type = other DNA
tttgcaaaattataggtcacac

SEQ ID NO: 2779 - DNA, 22 bp, synthetic construct
  misc_feature 1..22: note = Synthetic
  source 1..22: mol_type = other DNA
ataggtcacacggtggtatcta

SEQ ID NO: 2780 - DNA, 22 bp, synthetic construct
  misc_feature 1..22: note = Synthetic
  source 1..22: mol_type = other DNA
gtcacacggtggtatctattga

SEQ ID NO: 2781 - DNA, 22 bp, synthetic construct
  misc_feature 1..22: note = Synthetic
  source 1..22: mol_type = other DNA
acacggtggtatctattgaatg

SEQ ID NO: 2782 - DNA, 22 bp, synthetic construct
  misc_feature 1..22: note = Synthetic
  source 1..22: mol_type = other DNA
gtatctattgaatgaatgattt

SEQ ID NO: 2783 - DNA, 22 bp, synthetic construct
  misc_feature 1..22: note = Synthetic
  source 1..22: mol_type = other DNA
atgaatgatttaaaaatcaaaa

SEQ ID NO: 2784 - DNA, 22 bp, synthetic construct
  misc_feature 1..22: note = Synthetic
  source 1..22: mol_type = other DNA
tgatttaaaaatcaaaaagaaa

SEQ ID NO: 2785 - DNA, 22 bp, synthetic construct
  misc_feature 1..22: note = Synthetic
  source 1..22: mol_type = other DNA
aaaaagaaataaaatggcatga

SEQ ID NO: 2786 - DNA, 22 bp, synthetic construct
  misc_feature 1..22: note = Synthetic
  source 1..22: mol_type = other DNA
tgaaagagtaaagctttttcct

SEQ ID NO: 2787 - DNA, 22 bp, synthetic construct
  misc_feature 1..22: note = Synthetic
  source 1..22: mol_type = other DNA
tgagcttttctcctcttttttg

SEQ ID NO: 2788 - DNA, 22 bp, synthetic construct
  misc_feature 1..22: note = Synthetic
  source 1..22: mol_type = other DNA
gtttgtttatatatttaacctg

SEQ ID NO: 2789 - DNA, 22 bp, synthetic construct
  misc_feature 1..22: note = Synthetic
  source 1..22: mol_type = other DNA
ttaacctgtctaatccaccaag

SEQ ID NO: 2790 - DNA, 22 bp, synthetic construct
  misc_feature 1..22: note = Synthetic
  source 1..22: mol_type = other DNA
aagaagggtttttttgtaacat

SEQ ID NO: 2791 - DNA, 22 bp, synthetic construct
  misc_feature 1..22: note = Synthetic
  source 1..22: mol_type = other DNA
agggtttttttgtaacatttga

SEQ ID NO: 2792 - DNA, 22 bp, synthetic construct
  misc_feature 1..22: note = Synthetic
  source 1..22: mol_type = other DNA
acctgtgtggaactactcgcag

SEQ ID NO: 2793 - DNA, 22 bp, synthetic construct
  misc_feature 1..22: note = Synthetic
  source 1..22: mol_type = other DNA
gaactactcgcagagaaatgca

SEQ ID NO: 2794 - DNA, 22 bp, synthetic construct
  misc_feature 1..22: note = Synthetic
  source 1..22: mol_type = other DNA
agagaaatgcaaaggatggaaa

SEQ ID NO: 2795 - DNA, 22 bp, synthetic construct
  misc_feature 1..22: note = Synthetic
  source 1..22: mol_type = other DNA
tggaaacacagttcatgggctt

SEQ ID NO: 2796 - DNA, 22 bp, synthetic construct
  misc_feature 1..22: note = Synthetic
  source 1..22: mol_type = other DNA
aacacagttcatgggcttctgg

SEQ ID NO: 2797 - DNA, 22 bp, synthetic construct
  misc_feature 1..22: note = Synthetic
  source 1..22: mol_type = other DNA
atgggcttctgggttgatacct

SEQ ID NO: 2798 - DNA, 22 bp, synthetic construct
  misc_feature 1..22: note = Synthetic
  source 1..22: mol_type = other DNA
tgggttgatacctgtcagtatc

SEQ ID NO: 2799 - DNA, 22 bp, synthetic construct
  misc_feature 1..22: note = Synthetic
  source 1..22: mol_type = other DNA
tgatacctgtcagtatcacaaa

SEQ ID NO: 2800 - DNA, 22 bp, synthetic construct
  misc_feature 1..22: note = Synthetic
  source 1..22: mol_type = other DNA
gctactgttttacaccttttcc

SEQ ID NO: 2801 - DNA, 22 bp, synthetic construct
  misc_feature 1..22: note = Synthetic
  source 1..22: mol_type = other DNA
cttttcccaaagtttatttatt

SEQ ID NO: 2802 - DNA, 22 bp, synthetic construct
  misc_feature 1..22: note = Synthetic
  source 1..22: mol_type = other DNA
tttaaaaactcatcccacatgg

SEQ ID NO: 2803 - DNA, 22 bp, synthetic construct
  misc_feature 1..22: note = Synthetic
  source 1..22: mol_type = other DNA
aaaactcatcccacatgggaca

SEQ ID NO: 2804 - DNA, 22 bp, synthetic construct
  misc_feature 1..22: note = Synthetic
  source 1..22: mol_type = other DNA
aaaagcaacaaaaaccaaacca

SEQ ID NO: 2805 - DNA, 22 bp, synthetic construct
  misc_feature 1..22: note = Synthetic
  source 1..22: mol_type = other DNA
ccttttgactgtgagaagaggg

SEQ ID NO: 2806 - DNA, 22 bp, synthetic construct
  misc_feature 1..22: note = Synthetic
  source 1..22: mol_type = other DNA
tttgactgtgagaagagggcat

SEQ ID NO: 2807 - DNA, 22 bp, synthetic construct
  misc_feature 1..22: note = Synthetic
  source 1..22: mol_type = other DNA
ctgtgagaagagggcataataa

SEQ ID NO: 2808 - DNA, 22 bp, synthetic construct
  misc_feature 1..22: note = Synthetic
  source 1..22: mol_type = other DNA
gaagagggcataataatttagt

SEQ ID NO: 2809 - DNA, 22 bp, synthetic construct
  misc_feature 1..22: note = Synthetic
  source 1..22: mol_type = other DNA
acagagaactttatgtattatg

SEQ ID NO: 2810 - DNA, 22 bp, synthetic construct
  misc_feature 1..22: note = Synthetic
  source 1..22: mol_type = other DNA
ctttatgtattatgaacaatca

SEQ ID NO: 2811 - DNA, 22 bp, synthetic construct
  misc_feature 1..22: note = Synthetic
  source 1..22: mol_type = other DNA
caatcatccaatccttcactta

SEQ ID NO: 2812 - DNA, 22 bp, synthetic construct
  misc_feature 1..22: note = Synthetic
  source 1..22: mol_type = other DNA
aaagagtggcctactccttcac

SEQ ID NO: 2813 - DNA, 22 bp, synthetic construct
  misc_feature 1..22: note = Synthetic
  source 1..22: mol_type = other DNA
tactccttcacagggatgggct

SEQ ID NO: 2814 - DNA, 22 bp, synthetic construct
  misc_feature 1..22: note = Synthetic
  source 1..22: mol_type = other DNA
tatcatcgtcctgctactgctt

SEQ ID NO: 2815 - DNA, 22 bp, synthetic construct
  misc_feature 1..22: note = Synthetic
  source 1..22: mol_type = other DNA
tcctgctactgcttgggagtta

SEQ ID NO: 2816 - DNA, 22 bp, synthetic construct
  misc_feature 1..22: note = Synthetic
  source 1..22: mol_type = other DNA
gcttgggagttaaaaaatacct

SEQ ID NO: 2817 - DNA, 22 bp, synthetic construct
  misc_feature 1..22: note = Synthetic
  source 1..22: mol_type = other DNA
aaaaaataccttctgatgttca

SEQ ID NO: 2818 - DNA, 22 bp, synthetic construct
  misc_feature 1..22: note = Synthetic
  source 1..22: mol_type = other DNA
taccttctgatgttcacaaggt

SEQ ID NO: 2819 - DNA, 22 bp, synthetic construct
  misc_feature 1..22: note = Synthetic
  source 1..22: mol_type = other DNA
tgttcacaaggtcagaatacct

SEQ ID NO: 2820 - DNA, 22 bp, synthetic construct
  misc_feature 1..22: note = Synthetic
  source 1..22: mol_type = other DNA
cacaaggtcagaataccttctg

SEQ ID NO: 2821 - DNA, 22 bp, synthetic construct
  misc_feature 1..22: note = Synthetic
  source 1..22: mol_type = other DNA
attgatttccactgaagcatca

SEQ ID NO: 2822 - DNA, 22 bp, synthetic construct
  misc_feature 1..22: note = Synthetic
  source 1..22: mol_type = other DNA
ttccactgaagcatcattaaat

SEQ ID NO: 2823 - DNA, 22 bp, synthetic construct
  misc_feature 1..22: note = Synthetic
  source 1..22: mol_type = other DNA
tggcattgctagcagcaggaag

SEQ ID NO: 2824 - DNA, 22 bp, synthetic construct
  misc_feature 1..22: note = Synthetic
  source 1..22: mol_type = other DNA
ctagcagcaggaagctgaatgt

SEQ ID NO: 2825 - DNA, 22 bp, synthetic construct
  misc_feature 1..22: note = Synthetic
  source 1..22: mol_type = other DNA
cagcaggaagctgaatgtatca

SEQ ID NO: 2826 - DNA, 22 bp, synthetic construct
  misc_feature 1..22: note = Synthetic
  source 1..22: mol_type = other DNA
aggaagctgaatgtatcaatca

SEQ ID NO: 2827 - DNA, 22 bp, synthetic construct
  misc_feature 1..22: note = Synthetic
  source 1..22: mol_type = other DNA
agctgaatgtatcaatcaatca

SEQ ID NO: 2828 - DNA, 22 bp, synthetic construct
  misc_feature 1..22: note = Synthetic
  source 1..22: mol_type = other DNA
caatcaatcaatcaaccaacca

SEQ ID NO: 2829 - DNA, 22 bp, synthetic construct
  misc_feature 1..22: note = Synthetic
  source 1..22: mol_type = other DNA
aaccaaccaaccgattactcac

SEQ ID NO: 2830 - DNA, 22 bp, synthetic construct
  misc_feature 1..22: note = Synthetic
  source 1..22: mol_type = other DNA
accaaccgattactcactctga

SEQ ID NO: 2831 - DNA, 22 bp, synthetic construct
  misc_feature 1..22: note = Synthetic
  source 1..22: mol_type = other DNA
accgattactcactctgatata

SEQ ID NO: 2832 - DNA, 22 bp, synthetic construct
  misc_feature 1..22: note = Synthetic
  source 1..22: mol_type = other DNA
ttcattcacatgttccctttaa

SEQ ID NO: 2833 - DNA, 22 bp, synthetic construct
  misc_feature 1..22: note = Synthetic
  source 1..22: mol_type = other DNA
tcacatgttccctttaaaaaaa

SEQ ID NO: 2834 - DNA, 22 bp, synthetic construct
  misc_feature 1..22: note = Synthetic
  source 1..22: mol_type = other DNA
aatactttactttactttcgtt

SEQ ID NO: 2835 - DNA, 22 bp, synthetic construct
  misc_feature 1..22: note = Synthetic
  source 1..22: mol_type = other DNA
tactttactttcgttgtcagtg

SEQ ID NO: 2836 - DNA, 22 bp, synthetic construct
  misc_feature 1..22: note = Synthetic
  source 1..22: mol_type = other DNA
tcgttgtcagtggaaagttgtt

SEQ ID NO: 2837 - DNA, 22 bp, synthetic construct
  misc_feature 1..22: note = Synthetic
  source 1..22: mol_type = other DNA
atgagaaacatctggagctgta

SEQ ID NO: 2838 - DNA, 22 bp, synthetic construct
  misc_feature 1..22: note = Synthetic
  source 1..22: mol_type = other DNA
catctggagctgtagacaatgt

SEQ ID NO: 2839 - DNA, 22 bp, synthetic construct
  misc_feature 1..22: note = Synthetic
  source 1..22: mol_type = other DNA
ggagctgtagacaatgttttag

SEQ ID NO: 2840 - DNA, 22 bp, synthetic construct
  misc_feature 1..22: note = Synthetic
  source 1..22: mol_type = other DNA
tgtagacaatgttttagtgtgg

SEQ ID NO: 2841 - DNA, 22 bp, synthetic construct
  misc_feature 1..22: note = Synthetic
  source 1..22: mol_type = other DNA
cctcctggcttccggctccggg

SEQ ID NO: 2842 - DNA, 22 bp, synthetic construct
  misc_feature 1..22: note = Synthetic
  source 1..22: mol_type = other DNA
ggaaaaatccattctagaccaa

SEQ ID NO: 2843 - DNA, 22 bp, synthetic construct
  misc_feature 1..22: note = Synthetic
  source 1..22: mol_type = other DNA
attctagaccaagcaggtaagc

SEQ ID NO: 2844 - DNA, 22 bp, synthetic construct
  misc_feature 1..22: note = Synthetic
  source 1..22: mol_type = other DNA
aggtaagcctggatgactgact

SEQ ID NO: 2845 - DNA, 22 bp, synthetic construct
  misc_feature 1..22: note = Synthetic
  source 1..22: mol_type = other DNA
taagcctggatgactgactaga

SEQ ID NO: 2846 - DNA, 22 bp, synthetic construct
  misc_feature 1..22: note = Synthetic
  source 1..22: mol_type = other DNA
actagaagtaatttctttctat

SEQ ID NO: 2847 - DNA, 22 bp, synthetic construct
  misc_feature 1..22: note = Synthetic
  source 1..22: mol_type = other DNA
taggatgtgacatgaacattta

SEQ ID NO: 2848 - DNA, 22 bp, synthetic construct
  misc_feature 1..22: note = Synthetic
  source 1..22: mol_type = other DNA
acatgaacatttaaaaaatgga

SEQ ID NO: 2849 - DNA, 22 bp, synthetic construct
  misc_feature 1..22: note = Synthetic
  source 1..22: mol_type = other DNA
gaacatttaaaaaatggaaaaa

SEQ ID NO: 2850 - DNA, 22 bp, synthetic construct
  misc_feature 1..22: note = Synthetic
  source 1..22: mol_type = other DNA
aaaatggaaaaagtcagtctat

SEQ ID NO: 2851 - DNA, 22 bp, synthetic construct
  misc_feature 1..22: note = Synthetic
  source 1..22: mol_type = other DNA
cgtatctctttatctatataac

SEQ ID NO: 2852 - DNA, 22 bp, synthetic construct
  misc_feature 1..22: note = Synthetic
  source 1..22: mol_type = other DNA
gtatttatatacttatagacat

SEQ ID NO: 2853 - DNA, 22 bp, synthetic construct
  misc_feature 1..22: note = Synthetic
  source 1..22: mol_type = other DNA
tacttatagacatatagatata

SEQ ID NO: 2854 - DNA, 22 bp, synthetic construct
  misc_feature 1..22: note = Synthetic
  source 1..22: mol_type = other DNA
ctcaagcctgccccactcagct

SEQ ID NO: 2855 - DNA, 22 bp, synthetic construct
  misc_feature 1..22: note = Synthetic
  source 1..22: mol_type = other DNA
tgccccactcagctgacagttc

SEQ ID NO: 2856 - DNA, 22 bp, synthetic construct
  misc_feature 1..22: note = Synthetic
  source 1..22: mol_type = other DNA
ctcagctgacagttctcaaatg

SEQ ID NO: 2857 - DNA, 22 bp, synthetic construct
  misc_feature 1..22: note = Synthetic
  source 1..22: mol_type = other DNA
gacagttctcaaatgagcagtg

SEQ ID NO: 2858 - DNA, 22 bp, synthetic construct
  misc_feature 1..22: note = Synthetic
  source 1..22: mol_type = other DNA
agttctcaaatgagcagtgtgt

SEQ ID NO: 2859 - DNA, 22 bp, synthetic construct
  misc_feature 1..22: note = Synthetic
  source 1..22: mol_type = other DNA
aatgagcagtgtgtagtagtca

SEQ ID NO: 2860 - DNA, 22 bp, synthetic construct
  misc_feature 1..22: note = Synthetic
  source 1..22: mol_type = other DNA
gcagtgtgtagtagtcatttgg

SEQ ID NO: 2861 - DNA, 22 bp, synthetic construct
  misc_feature 1..22: note = Synthetic
  source 1..22: mol_type = other DNA
gtgtgtagtagtcatttggtgt

SEQ ID NO: 2862 - DNA, 22 bp, synthetic construct
  misc_feature 1..22: note = Synthetic
  source 1..22: mol_type = other DNA
agtcatttggtgtggtggtaga

SEQ ID NO: 2863 - DNA, 22 bp, synthetic construct
  misc_feature 1..22: note = Synthetic
  source 1..22: mol_type = other DNA
tggtggtagaggaagtcttatc

SEQ ID NO: 2864 - DNA, 22 bp, synthetic construct
  misc_feature 1..22: note = Synthetic
  source 1..22: mol_type = other DNA
atatgcaaaaaaagaaaaagcc

SEQ ID NO: 2865 - DNA, 22 bp, synthetic construct
  misc_feature 1..22: note = Synthetic
  source 1..22: mol_type = other DNA
aagaaaaagccatgaatttcat

SEQ ID NO: 2866 - DNA, 22 bp, synthetic construct
  misc_feature 1..22: note = Synthetic
  source 1..22: mol_type = other DNA
tttcatatggatatcacgccaa

SEQ ID NO: 2867 - DNA, 22 bp, synthetic construct
  misc_feature 1..22: note = Synthetic
  source 1..22: mol_type = other DNA
atatcacgccaaaaggatgcaa

SEQ ID NO: 2868 - DNA, 22 bp, synthetic construct
  misc_feature 1..22: note = Synthetic
  source 1..22: mol_type = other DNA
gatgcaaaacaatgcgctgcct

SEQ ID NO: 2869 - DNA, 22 bp, synthetic construct
  misc_feature 1..22: note = Synthetic
  source 1..22: mol_type = other DNA
tgtgtgtgtttgttttgttttt

SEQ ID NO: 2870 - DNA, 22 bp, synthetic construct
  misc_feature 1..22: note = Synthetic
  source 1..22: mol_type = other DNA
aacttttttttataaagcacac

SEQ ID NO: 2871 - DNA, 22 bp, synthetic construct
  misc_feature 1..22: note = Synthetic
  source 1..22: mol_type = other DNA
ttttataaagcacactttagtt

SEQ ID NO: 2872 - DNA, 22 bp, synthetic construct
  misc_feature 1..22: note = Synthetic
  source 1..22: mol_type = other DNA
acaatctttctttataactgtt

SEQ ID NO: 2873 - DNA, 22 bp, synthetic construct
  misc_feature 1..22: note = Synthetic
  source 1..22: mol_type = other DNA
tgttataaatttttaaacaacc

SEQ ID NO: 2874 - DNA, 22 bp, synthetic construct
  misc_feature 1..22: note = Synthetic
  source 1..22: mol_type = other DNA
acccaaaatgcgttccatataa

SEQ ID NO: 2875 - DNA, 22 bp, synthetic construct
  misc_feature 1..22: note = Synthetic
  source 1..22: mol_type = other DNA
atgcgttccatataaagaaatg

SEQ ID NO: 2876 - DNA, 22 bp, synthetic construct
  misc_feature 1..22: note = Synthetic
  source 1..22: mol_type = other DNA
aaatggcaagttatttagctat

SEQ ID NO: 2877 - DNA, 22 bp, synthetic construct
  misc_feature 1..22: note = Synthetic
  source 1..22: mol_type = other DNA
atttagctatcaagattttaca

SEQ ID NO: 2878 - DNA, 22 bp, synthetic construct
  misc_feature 1..22: note = Synthetic
  source 1..22: mol_type = other DNA
tagttttcttataacttttttg

SEQ ID NO: 2879 - DNA, 22 bp, synthetic construct
  misc_feature 1..22: note = Synthetic
  source 1..22: mol_type = other DNA
taaaacctgccattgttaacaa

SEQ ID NO: 2880 - DNA, 22 bp, synthetic construct
  misc_feature 1..22: note = Synthetic
  source 1..22: mol_type = other DNA
caataacagacttagaaactac

SEQ ID NO: 2881 - DNA, 22 bp, synthetic construct
  misc_feature 1..22: note = Synthetic
  source 1..22: mol_type = other DNA
agacttagaaactactgaaatc

SEQ ID NO: 2882 - DNA, 22 bp, synthetic construct
  misc_feature 1..22: note = Synthetic
  source 1..22: mol_type = other DNA
tagaaactactgaaatctacag

SEQ ID NO: 2883 - DNA, 22 bp, synthetic construct
  misc_feature 1..22: note = Synthetic
  source 1..22: mol_type = other DNA
gtataataccactacccttcac

SEQ ID NO: 2884 - DNA, 22 bp, synthetic construct
  misc_feature 1..22: note = Synthetic
  source 1..22: mol_type = other DNA
taccactacccttcacaaaaat

SEQ ID NO: 2885 - DNA, 22 bp, synthetic construct
  misc_feature 1..22: note = Synthetic
  source 1..22: mol_type = other DNA
tatttcttgtaaactcttactg

SEQ ID NO: 2886 - DNA, 22 bp, synthetic construct
  misc_feature 1..22: note = Synthetic
  source 1..22: mol_type = other DNA
actgtctaatcctctttgttgt

SEQ ID NO: 2887 - DNA, 22 bp, synthetic construct
  misc_feature 1..22: note = Synthetic
  source 1..22: mol_type = other DNA
atgaatattataaaaaccatgc

SEQ ID NO: 2888 - DNA, 22 bp, synthetic construct
  misc_feature 1..22: note = Synthetic
  source 1..22: mol_type = other DNA
ttataaaaaccatgcgggaatc

SEQ ID NO: 2889 - DNA, 22 bp, synthetic construct
  misc_feature 1..22: note = Synthetic
  source 1..22: mol_type = other DNA
tgctccttcttcatctgtcatg

SEQ ID NO: 2890 - DNA, 22 bp, synthetic construct
  misc_feature 1..22: note = Synthetic
  source 1..22: mol_type = other DNA
actaaggactccatcgctctgc

SEQ ID NO: 2891 - DNA, 22 bp, synthetic construct
  misc_feature 1..22: note = Synthetic
  source 1..22: mol_type = other DNA
aaagcacgcagttatgttacaa

SEQ ID NO: 2892 - DNA, 22 bp, synthetic construct
  misc_feature 1..22: note = Synthetic
  source 1..22: mol_type = other DNA
tactgtgtatctcaataaagca

SEQ ID NO: 2893 - DNA, 22 bp, synthetic construct
  misc_feature 1..22: note = Synthetic
  source 1..22: mol_type = other DNA
atagtactgctttactgtgtat

SEQ ID NO: 2894 - DNA, 22 bp, synthetic construct
  misc_feature 1..22: note = Synthetic
  source 1..22: mol_type = other DNA
aatatatgccttactattgtat

SEQ ID NO: 2895 - DNA, 22 bp, synthetic construct
  misc_feature 1..22: note = Synthetic
  source 1..22: mol_type = other DNA
tttcacaacatatcagacttca

SEQ ID NO: 2896 - DNA, 22 bp, synthetic construct
  misc_feature 1..22: note = Synthetic
  source 1..22: mol_type = other DNA
tttacgaattatttttttaaac

SEQ ID NO: 2897 - DNA, 22 bp, synthetic construct
  misc_feature 1..22: note = Synthetic
  source 1..22: mol_type = other DNA
taacaccaacactgtaacattt

SEQ ID NO: 2898 - DNA, 22 bp, synthetic construct
  misc_feature 1..22: note = Synthetic
  source 1..22: mol_type = other DNA
tactgagttcttacttgagtat

SEQ ID NO: 2899 - DNA, 22 bp, synthetic construct
  misc_feature 1..22: note = Synthetic
  source 1..22: mol_type = other DNA
ttttcaggtactgagttcttac

SEQ ID NO: 2900 - DNA, 22 bp, synthetic construct
  misc_feature 1..22: note = Synthetic
  source 1..22: mol_type = other DNA
gttttgtcattgttttcaggta

SEQ ID NO: 2901 - DNA, 22 bp, synthetic construct
  misc_feature 1..22: note = Synthetic
  source 1..22: mol_type = other DNA
atggcatgttttgtcattgttt

SEQ ID NO: 2902 - DNA, 22 bp, synthetic construct
  misc_feature 1..22: note = Synthetic
  source 1..22: mol_type = other DNA
caccaagtattaaactgtaaat

SEQ ID NO: 2903 - DNA, 22 bp, synthetic construct
  misc_feature 1..22: note = Synthetic
  source 1..22: mol_type = other DNA
tataaccaccaagtattaaact

SEQ ID NO: 2904 - DNA, 22 bp, synthetic construct
  misc_feature 1..22: note = Synthetic
  source 1..22: mol_type = other DNA
cgtgttgtgttctttataacca

SEQ ID NO: 2905 - DNA, 22 bp, synthetic construct
  misc_feature 1..22: note = Synthetic
  source 1..22: mol_type = other DNA
ttattgctgcattttaagcata

SEQ ID NO: 2906 - DNA, 22 bp, synthetic construct
  misc_feature 1..22: note = Synthetic
  source 1..22: mol_type = other DNA
agctttattgctgcattttaag

SEQ ID NO: 2907 - DNA, 22 bp, synthetic construct
  misc_feature 1..22: note = Synthetic
  source 1..22: mol_type = other DNA
gagtctgtcataatatttgaac

SEQ ID NO: 2908 - DNA, 22 bp, synthetic construct
  misc_feature 1..22: note = Synthetic
  source 1..22: mol_type = other DNA
attagctctggagtgagtctgt

SEQ ID NO: 2909 - DNA, 22 bp, synthetic construct
  misc_feature 1..22: note = Synthetic
  source 1..22: mol_type = other DNA
ttttagacacattagctctgga

SEQ ID NO: 2910 - DNA, 22 bp, synthetic construct
  misc_feature 1..22: note = Synthetic
  source 1..22: mol_type = other DNA
tttcttttagacacattagctc

SEQ ID NO: 2911 - DNA, 22 bp, synthetic construct
  misc_feature 1..22: note = Synthetic
  source 1..22: mol_type = other DNA
tagagtgcataaataattttgt

SEQ ID NO: 2912 - DNA, 22 bp, synthetic construct
  misc_feature 1..22: note = Synthetic
  source 1..22: mol_type = other DNA
tcagaggtaaatagagtgcata

SEQ ID NO: 2913 - DNA, 22 bp, synthetic construct
  misc_feature 1..22: note = Synthetic
  source 1..22: mol_type = other DNA
aaatcagaggtaaatagagtgc

SEQ ID NO: 2914 - DNA, 22 bp, synthetic construct
  misc_feature 1..22: note = Synthetic
  source 1..22: mol_type = other DNA
tcattctaaaatcagaggtaaa

SEQ ID NO: 2915 - DNA, 22 bp, synthetic construct
  misc_feature 1..22: note = Synthetic
  source 1..22: mol_type = other DNA
aagtttcattctaaaatcagag

SEQ ID NO: 2916 - DNA, 22 bp, synthetic construct
  misc_feature 1..22: note = Synthetic
  source 1..22: mol_type = other DNA
aagtaagtttcattctaaaatc

SEQ ID NO: 2917 - DNA, 22 bp, synthetic construct
  misc_feature 1..22: note = Synthetic
  source 1..22: mol_type = other DNA
tttaagtaagtaagtttcattc

SEQ ID NO: 2918 - DNA, 22 bp, synthetic construct
  misc_feature 1..22: note = Synthetic
  source 1..22: mol_type = other DNA
tcctactaagaagtttaagtaa

SEQ ID NO: 2919 - DNA, 22 bp, synthetic construct
  misc_feature 1..22: note = Synthetic
  source 1..22: mol_type = other DNA
tacatcctactaagaagtttaa

SEQ ID NO: 2920 - DNA, 22 bp, synthetic construct
  misc_feature 1..22: note = Synthetic
  source 1..22: mol_type = other DNA
actttacatcctactaagaagt

SEQ ID NO: 2921 - DNA, 22 bp, synthetic construct
  misc_feature 1..22: note = Synthetic
  source 1..22: mol_type = other DNA
ggggttactttacatcctacta

SEQ ID NO: 2922 - DNA, 22 bp, synthetic construct
  misc_feature 1..22: note = Synthetic
  source 1..22: mol_type = other DNA
tttaaaactcagatttaaaaca

SEQ ID NO: 2923 - DNA, 22 bp, synthetic construct
  misc_feature 1..22: note = Synthetic
  source 1..22: mol_type = other DNA
tttacccaaggatttttaaaac

SEQ ID NO: 2924 - DNA, 22 bp, synthetic construct
  misc_feature 1..22: note = Synthetic
  source 1..22: mol_type = other DNA
acgctggaccttttctttaccc

SEQ ID NO: 2925 - DNA, 22 bp, synthetic construct
  misc_feature 1..22: note = Synthetic
  source 1..22: mol_type = other DNA
aaattaccaaattacatgaaga

SEQ ID NO: 2926 - DNA, 22 bp, synthetic construct
  misc_feature 1..22: note = Synthetic
  source 1..22: mol_type = other DNA
gtaacaaattaccaaattacat

SEQ ID NO: 2927 - DNA, 22 bp, synthetic construct
  misc_feature 1..22: note = Synthetic
  source 1..22: mol_type = other DNA
aaagctctaaggtaacaaatta

SEQ ID NO: 2928 - DNA, 22 bp, synthetic construct
  misc_feature 1..22: note = Synthetic
  source 1..22: mol_type = other DNA
gaaaacccaaagctctaaggta

SEQ ID NO: 2929 - DNA, 22 bp, synthetic construct
  misc_feature 1..22: note = Synthetic
  source 1..22: mol_type = other DNA
ttcaaaagaaaacccaaagctc

SEQ ID NO: 2930 - DNA, 22 bp, synthetic construct
  misc_feature 1..22: note = Synthetic
  source 1..22: mol_type = other DNA
ttataattctttctttttcctt

SEQ ID NO: 2931 - DNA, 22 bp, synthetic construct
  misc_feature 1..22: note = Synthetic
  source 1..22: mol_type = other DNA
ttgcgttattttctttttcctt

SEQ ID NO: 2932 - DNA, 22 bp, synthetic construct
  misc_feature 1..22: note = Synthetic
  source 1..22: mol_type = other DNA
tgttcctgataattgtgcacac

SEQ ID NO: 2933 - DNA, 22 bp, synthetic construct
  misc_feature 1..22: note = Synthetic
  source 1..22: mol_type = other DNA
actttggttttggggtgttcct

SEQ ID NO: 2934 - DNA, 22 bp, synthetic construct
  misc_feature 1..22: note = Synthetic
  source 1..22: mol_type = other DNA
ctcactttggttttggggtgtt

SEQ ID NO: 2935 - DNA, 22 bp, synthetic construct
  misc_feature 1..22: note = Synthetic
  source 1..22: mol_type = other DNA
tatttctacctcactttggttt

SEQ ID NO: 2936 - DNA, 22 bp, synthetic construct
  misc_feature 1..22: note = Synthetic
  source 1..22: mol_type = other DNA
tctcatgctatttctacctcac

SEQ ID NO: 2937 - DNA, 22 bp, synthetic construct
  misc_feature 1..22: note = Synthetic
  source 1..22: mol_type = other DNA
ttttgtccattattaataatta

SEQ ID NO: 2938 - DNA, 22 bp, synthetic construct
  misc_feature 1..22: note = Synthetic
  source 1..22: mol_type = other DNA
tgggttttgtccattattaata

SEQ ID NO: 2939 - DNA, 22 bp, synthetic construct
  misc_feature 1..22: note = Synthetic
  source 1..22: mol_type = other DNA
agagtgggttttgtccattatt

SEQ ID NO: 2940 - DNA, 22 bp, synthetic construct
  misc_feature 1..22: note = Synthetic
  source 1..22: mol_type = other DNA
tggagagtgggttttgtccatt

SEQ ID NO: 2941 - DNA, 22 bp, synthetic construct
  misc_feature 1..22: note = Synthetic
  source 1..22: mol_type = other DNA
aagtgtaattagcttttggaga

SEQ ID NO: 2942 - DNA, 22 bp, synthetic construct
  misc_feature 1..22: note = Synthetic
  source 1..22: mol_type = other DNA
catcaagtgtaattagcttttg

SEQ ID NO: 2943 - DNA, 22 bp, synthetic construct
  misc_feature 1..22: note = Synthetic
  source 1..22: mol_type = other DNA
tggagagtgggctgacatcaag

SEQ ID NO: 2944 - DNA, 22 bp, synthetic construct
  misc_feature 1..22: note = Synthetic
  source 1..22: mol_type = other DNA
gcttttggagagtgggctgaca

SEQ ID NO: 2945 - DNA, 22 bp, synthetic construct
  misc_feature 1..22: note = Synthetic
  source 1..22: mol_type = other DNA
catcaagtgtaattagcttttg

SEQ ID NO: 2946 - DNA, 22 bp, synthetic construct
  misc_feature 1..22: note = Synthetic
  source 1..22: mol_type = other DNA
atctgttacctctgacatcaag

SEQ ID NO: 2947 - DNA, 22 bp, synthetic construct
  misc_feature 1..22: note = Synthetic
  source 1..22: mol_type = other DNA
tgcaaatctgttacctctgaca

SEQ ID NO: 2948 - DNA, 22 bp, synthetic construct
  misc_feature 1..22: note = Synthetic
  source 1..22: mol_type = other DNA
ccaccgtgtgacctataatttt

SEQ ID NO: 2949 - DNA, 22 bp, synthetic construct
  misc_feature 1..22: note = Synthetic
  source 1..22: mol_type = other DNA
caatagataccaccgtgtgacc

SEQ ID NO: 2950 - DNA, 22 bp, synthetic construct
  misc_feature 1..22: note = Synthetic
  source 1..22: mol_type = other DNA
tgatttttaaatcattcattca

SEQ ID NO: 2951 - DNA, 22 bp, synthetic construct
  misc_feature 1..22: note = Synthetic
  source 1..22: mol_type = other DNA
tttttgatttttaaatcattca

SEQ ID NO: 2952 - DNA, 22 bp, synthetic construct
  misc_feature 1..22: note = Synthetic
  source 1..22: mol_type = other DNA
ccattttatttctttttgattt

SEQ ID NO: 2953 - DNA, 22 bp, synthetic construct
  misc_feature 1..22: note = Synthetic
  source 1..22: mol_type = other DNA
ctttcatgccattttatttctt

SEQ ID NO: 2954 - DNA, 22 bp, synthetic construct
  misc_feature 1..22: note = Synthetic
  source 1..22: mol_type = other DNA
agctcaagaggaaaagctaagg

SEQ ID NO: 2955 - DNA, 22 bp, synthetic construct
  misc_feature 1..22: note = Synthetic
  source 1..22: mol_type = other DNA
ttaaatatataaacaaacaaac

SEQ ID NO: 2956 - DNA, 22 bp, synthetic construct
  misc_feature 1..22: note = Synthetic
  source 1..22: mol_type = other DNA
ccttcttggtggattagacagg

SEQ ID NO: 2957 - DNA, 22 bp, synthetic construct
  misc_feature 1..22: note = Synthetic
  source 1..22: mol_type = other DNA
aaaacccttcttggtggattag

SEQ ID NO: 2958 - DNA, 22 bp, synthetic construct
  misc_feature 1..22: note = Synthetic
  source 1..22: mol_type = other DNA
tgttacaaaaaaacccttcttg

SEQ ID NO: 2959 - DNA, 22 bp, synthetic construct
  misc_feature 1..22: note = Synthetic
  source 1..22: mol_type = other DNA
caaatgttacaaaaaaaccctt

SEQ ID NO: 2960 - DNA, 22 bp, synthetic construct
  misc_feature 1..22: note = Synthetic
  source 1..22: mol_type = other DNA
gtaagaaagaaggcaaattgat

SEQ ID NO: 2961 - DNA, 22 bp, synthetic construct
  misc_feature 1..22: note = Synthetic
  source 1..22: mol_type = other DNA
aagtaagtaagaaagaaggcaa

SEQ ID NO: 2962 - DNA, 22 bp, synthetic construct
  misc_feature 1..22: note = Synthetic
  source 1..22: mol_type = other DNA
ttgtaagtaagtaagaaagaag

SEQ ID NO: 2963 - DNA, 22 bp, synthetic construct
  misc_feature 1..22: note = Synthetic
  source 1..22: mol_type = other DNA
gtagttccacacaggtttgtaa

SEQ ID NO: 2964 - DNA, 22 bp, synthetic construct
  misc_feature 1..22: note = Synthetic
  source 1..22: mol_type = other DNA
gcgagtagttccacacaggttt

SEQ ID NO: 2965 - DNA, 22 bp, synthetic construct
  misc_feature 1..22: note = Synthetic
  source 1..22: mol_type = other DNA
atttctctgcgagtagttccac

SEQ ID NO: 2966 - DNA, 22 bp, synthetic construct
  misc_feature 1..22: note = Synthetic
  source 1..22: mol_type = other DNA
ccatcctttgcatttctctgcg

SEQ ID NO: 2967 - DNA, 22 bp, synthetic construct
  misc_feature 1..22: note = Synthetic
  source 1..22: mol_type = other DNA
tttccatcctttgcatttctct

SEQ ID NO: 2968 - DNA, 22 bp, synthetic construct
  misc_feature 1..22: note = Synthetic
  source 1..22: mol_type = other DNA
ccccatcacatttgtgatactg

SEQ ID NO: 2969 - DNA, 22 bp, synthetic construct
  misc_feature 1..22: note = Synthetic
  source 1..22: mol_type = other DNA
aaaacagtagccccatcacatt

SEQ ID NO: 2970 - DNA, 22 bp, synthetic construct
  misc_feature 1..22: note = Synthetic
  source 1..22: mol_type = other DNA
taaactttgggaaaaggtgtaa

SEQ ID NO: 2971 - DNA, 22 bp, synthetic construct
  misc_feature 1..22: note = Synthetic
  source 1..22: mol_type = other DNA
ttaaaataaataaactttggga

SEQ ID NO: 2972 - DNA, 22 bp, synthetic construct
  misc_feature 1..22: note = Synthetic
  source 1..22: mol_type = other DNA
atgccacaagacataatttaaa

SEQ ID NO: 2973 - DNA, 22 bp, synthetic construct
  misc_feature 1..22: note = Synthetic
  source 1..22: mol_type = other DNA
ttaaatgccacaagacataatt

SEQ ID NO: 2974 - DNA, 22 bp, synthetic construct
  misc_feature 1..22: note = Synthetic
  source 1..22: mol_type = other DNA
tgagtttttaaatgccacaaga

SEQ ID NO: 2975 - DNA, 22 bp, synthetic construct
  misc_feature 1..22: note = Synthetic
  source 1..22: mol_type = other DNA
ttgtcccatgtgggatgagttt

SEQ ID NO: 2976 - DNA, 22 bp, synthetic construct
  misc_feature 1..22: note = Synthetic
  source 1..22: mol_type = other DNA
tagatttattgtcccatgtggg

SEQ ID NO: 2977 - DNA, 22 bp, synthetic construct
  misc_feature 1..22: note = Synthetic
  source 1..22: mol_type = other DNA
tttttagatttattgtcccatg

SEQ ID NO: 2978 - DNA, 22 bp, synthetic construct
  misc_feature 1..22: note = Synthetic
  source 1..22: mol_type = other DNA
tggtttggtttttgttgctttt

SEQ ID NO: 2979 - DNA, 22 bp, synthetic construct
  misc_feature 1..22: note = Synthetic
  source 1..22: mol_type = other DNA
acagtcaaaaggaactgggtgg

SEQ ID NO: 2980 - DNA, 22 bp, synthetic construct
  misc_feature 1..22: note = Synthetic
  source 1..22: mol_type = other DNA
ttctcacagtcaaaaggaactg

SEQ ID NO: 2981 - DNA, 22 bp, synthetic construct
  misc_feature 1..22: note = Synthetic
  source 1..22: mol_type = other DNA
ctcttctcacagtcaaaaggaa

SEQ ID NO: 2982 - DNA, 22 bp, synthetic construct
  misc_feature 1..22: note = Synthetic
  source 1..22: mol_type = other DNA
ctaaattattatgccctcttct

SEQ ID NO: 2983 - DNA, 22 bp, synthetic construct
  misc_feature 1..22: note = Synthetic
  source 1..22: mol_type = other DNA
ataaagttctctgtaattacaa

SEQ ID NO: 2984 - DNA, 22 bp, synthetic construct
  misc_feature 1..22: note = Synthetic
  source 1..22: mol_type = other DNA
gttcataatacataaagttctc

SEQ ID NO: 2985 - DNA, 22 bp, synthetic construct
  misc_feature 1..22: note = Synthetic
  source 1..22: mol_type = other DNA
ttggatgattgttcataataca

SEQ ID NO: 2986 - DNA, 22 bp, synthetic construct
  misc_feature 1..22: note = Synthetic
  source 1..22: mol_type = other DNA
agtgaaggattggatgattgtt

SEQ ID NO: 2987 - DNA, 22 bp, synthetic construct
  misc_feature 1..22: note = Synthetic
  source 1..22: mol_type = other DNA
ccactctttaagtgaaggattg

SEQ ID NO: 2988 - DNA, 22 bp, synthetic construct
  misc_feature 1..22: note = Synthetic
  source 1..22: mol_type = other DNA
aggccactctttaagtgaagga

SEQ ID NO: 2989 - DNA, 22 bp, synthetic construct
  misc_feature 1..22: note = Synthetic
  source 1..22: mol_type = other DNA
ggagtaggccactctttaagtg

SEQ ID NO: 2990 - DNA, 22 bp, synthetic construct
  misc_feature 1..22: note = Synthetic
  source 1..22: mol_type = other DNA
ctgtgaaggagtaggccactct

SEQ ID NO: 2991 - DNA, 22 bp, synthetic construct
  misc_feature 1..22: note = Synthetic
  source 1..22: mol_type = other DNA
gattcccagcccatccctgtga

SEQ ID NO: 2992 - DNA, 22 bp, synthetic construct
  misc_feature 1..22: note = Synthetic
  source 1..22: mol_type = other DNA
acgatgatagggctggagggct

SEQ ID NO: 2993 - DNA, 22 bp, synthetic construct
  misc_feature 1..22: note = Synthetic
  source 1..22: mol_type = other DNA
aactcccaagcagtagcaggac

SEQ ID NO: 2994 - DNA, 22 bp, synthetic construct
  misc_feature 1..22: note = Synthetic
  source 1..22: mol_type = other DNA
tttaactcccaagcagtagcag

SEQ ID NO: 2995 - DNA, 22 bp, synthetic construct
  misc_feature 1..22: note = Synthetic
  source 1..22: mol_type = other DNA
agaaggtattttttaactccca

SEQ ID NO: 2996 - DNA, 22 bp, synthetic construct
  misc_feature 1..22: note = Synthetic
  source 1..22: mol_type = other DNA
tattctgaccttgtgaacatca

SEQ ID NO: 2997 - DNA, 22 bp, synthetic construct
  misc_feature 1..22: note = Synthetic
  source 1..22: mol_type = other DNA
atgcttcagtggaaatcaatca

SEQ ID NO: 2998 - DNA, 22 bp, synthetic construct
  misc_feature 1..22: note = Synthetic
  source 1..22: mol_type = other DNA
atttaatgatgcttcagtggaa

SEQ ID NO: 2999 - DNA, 22 bp, synthetic construct
  misc_feature 1..22: note = Synthetic
  source 1..22: mol_type = other DNA
ttagatttaatgatgcttcagt

SEQ ID NO: 3000 - DNA, 22 bp, synthetic construct
  misc_feature 1..22: note = Synthetic
  source 1..22: mol_type = other DNA
cacgatttagatttaatgatgc

SEQ ID NO: 3001 - DNA, 22 bp, synthetic construct
  misc_feature 1..22: note = Synthetic
  source 1..22: mol_type = other DNA
agcaatgccacgatttagattt

SEQ ID NO: 3002 - DNA, 22 bp, synthetic construct
  misc_feature 1..22: note = Synthetic
  source 1..22: mol_type = other DNA
gctagcaatgccacgatttaga

SEQ ID NO: 3003 - DNA, 22 bp, synthetic construct
  misc_feature 1..22: note = Synthetic
  source 1..22: mol_type = other DNA
ctgctgctagcaatgccacgat

SEQ ID NO: 3004 - DNA, 22 bp, synthetic construct
  misc_feature 1..22: note = Synthetic
  source 1..22: mol_type = other DNA
agcttcctgctgctagcaatgc

SEQ ID NO: 3005 - DNA, 22 bp, synthetic construct
  misc_feature 1..22: note = Synthetic
  source 1..22: mol_type = other DNA
atacattcagcttcctgctgct

SEQ ID NO: 3006 - DNA, 22 bp, synthetic construct
  misc_feature 1..22: note = Synthetic
  source 1..22: mol_type = other DNA
tggttggttgattgattgattg

SEQ ID NO: 3007 - DNA, 22 bp, synthetic construct
  misc_feature 1..22: note = Synthetic
  source 1..22: mol_type = other DNA
cggttggttggttgattgattg

SEQ ID NO: 3008 - DNA, 22 bp, synthetic construct
  misc_feature 1..22: note = Synthetic
  source 1..22: mol_type = other DNA
taatcggttggttggttgattg

SEQ ID NO: 3009 - DNA, 22 bp, synthetic construct
  misc_feature 1..22: note = Synthetic
  source 1..22: mol_type = other DNA
tgagtaatcggttggttggttg

SEQ ID NO: 3010 - DNA, 22 bp, synthetic construct
  misc_feature 1..22: note = Synthetic
  source 1..22: mol_type = other DNA
agagtgagtaatcggttggttg

SEQ ID NO: 3011 - DNA, 22 bp, synthetic construct
  misc_feature 1..22: note = Synthetic
  source 1..22: mol_type = other DNA
tatcagagtgagtaatcggttg

SEQ ID NO: 3012 - DNA, 22 bp, synthetic construct
  misc_feature 1..22: note = Synthetic
  source 1..22: mol_type = other DNA
attatatcagagtgagtaatcg

SEQ ID NO: 3013 - DNA, 22 bp, synthetic construct
  misc_feature 1..22: note = Synthetic
  source 1..22: mol_type = other DNA
acttattatatcagagtgagta

SEQ ID NO: 3014 - DNA, 22 bp, synthetic construct
  misc_feature 1..22: note = Synthetic
  source 1..22: mol_type = other DNA
caggacttattatatcagagtg

SEQ ID NO: 3015 - DNA, 22 bp, synthetic construct
  misc_feature 1..22: note = Synthetic
  source 1..22: mol_type = other DNA
acacaggacttattatatcaga

SEQ ID NO: 3016 - DNA, 22 bp, synthetic construct
  misc_feature 1..22: note = Synthetic
  source 1..22: mol_type = other DNA
gaatacacaggacttattatat

SEQ ID NO: 3017 - DNA, 22 bp, synthetic construct
  misc_feature 1..22: note = Synthetic
  source 1..22: mol_type = other DNA
tttttttaaagggaacatgtga

SEQ ID NO: 3018 - DNA, 22 bp, synthetic construct
  misc_feature 1..22: note = Synthetic
  source 1..22: mol_type = other DNA
tggatttttttaaagggaacat

SEQ ID NO: 3019 - DNA, 22 bp, synthetic construct
  misc_feature 1..22: note = Synthetic
  source 1..22: mol_type = other DNA
acaacgaaagtaaagtaaagta

SEQ ID NO: 3020 - DNA, 22 bp, synthetic construct
  misc_feature 1..22: note = Synthetic
  source 1..22: mol_type = other DNA
tccactgacaacgaaagtaaag

SEQ ID NO: 3021 - DNA, 22 bp, synthetic construct
  misc_feature 1..22: note = Synthetic
  source 1..22: mol_type = other DNA
aactttccactgacaacgaaag

SEQ ID NO: 3022 - DNA, 22 bp, synthetic construct
  misc_feature 1..22: note = Synthetic
  source 1..22: mol_type = other DNA
taaacaactttccactgacaac

SEQ ID NO: 3023 - DNA, 22 bp, synthetic construct
  misc_feature 1..22: note = Synthetic
  source 1..22: mol_type = other DNA
cactaaaacattgtctacagct

SEQ ID NO: 3024 - DNA, 22 bp, synthetic construct
  misc_feature 1..22: note = Synthetic
  source 1..22: mol_type = other DNA
aggcttacctgcttggtctaga

SEQ ID NO: 3025 - DNA, 22 bp, synthetic construct
  misc_feature 1..22: note = Synthetic
  source 1..22: mol_type = other DNA
atccaggcttacctgcttggtc

SEQ ID NO: 3026 - DNA, 22 bp, synthetic construct
  misc_feature 1..22: note = Synthetic
  source 1..22: mol_type = other DNA
gtcagtcatccaggcttacctg

SEQ ID NO: 3027 - DNA, 22 bp, synthetic construct
  misc_feature 1..22: note = Synthetic
  source 1..22: mol_type = other DNA
taatagaaagaaattacttcta

SEQ ID NO: 3028 - DNA, 22 bp, synthetic construct
  misc_feature 1..22: note = Synthetic
  source 1..22: mol_type = other DNA
atcctaatagaaagaaattact

SEQ ID NO: 3029 - DNA, 22 bp, synthetic construct
  misc_feature 1..22: note = Synthetic
  source 1..22: mol_type = other DNA
ttcatgtcacatcctaatagaa

SEQ ID NO: 3030 - DNA, 22 bp, synthetic construct
  misc_feature 1..22: note = Synthetic
  source 1..22: mol_type = other DNA
tttttaaatgttcatgtcacat

SEQ ID NO: 3031 - DNA, 22 bp, synthetic construct
  misc_feature 1..22: note = Synthetic
  source 1..22: mol_type = other DNA
atagactgactttttccatttt

SEQ ID NO: 3032 - DNA, 22 bp, synthetic construct
  misc_feature 1..22: note = Synthetic
  source 1..22: mol_type = other DNA
atagttatatagataaagagat

SEQ ID NO: 3033 - DNA, 22 bp, synthetic construct
  misc_feature 1..22: note = Synthetic
  source 1..22: mol_type = other DNA
aatactatagttatatagataa

SEQ ID NO: 3034 - DNA, 22 bp, synthetic construct
  misc_feature 1..22: note = Synthetic
  source 1..22: mol_type = other DNA
agtatataaatactatagttat

SEQ ID NO: 3035 - DNA, 22 bp, synthetic construct
  misc_feature 1..22: note = Synthetic
  source 1..22: mol_type = other DNA
atgtctataagtatataaatac

SEQ ID NO: 3036 - DNA, 22 bp, synthetic construct
  misc_feature 1..22: note = Synthetic
  source 1..22: mol_type = other DNA
atatctatatgtctataagtat

SEQ ID NO: 3037 - DNA, 22 bp, synthetic construct
  misc_feature 1..22: note = Synthetic
  source 1..22: mol_type = other DNA
catttcatatatctatatgtct

SEQ ID NO: 3038 - DNA, 22 bp, synthetic construct
  misc_feature 1..22: note = Synthetic
  source 1..22: mol_type = other DNA
ctgtcagctgagtggggcaggc

SEQ ID NO: 3039 - DNA, 22 bp, synthetic construct
  misc_feature 1..22: note = Synthetic
  source 1..22: mol_type = other DNA
ctgctcatttgagaactgtcag

SEQ ID NO: 3040 - DNA, 22 bp, synthetic construct
  misc_feature 1..22: note = Synthetic
  source 1..22: mol_type = other DNA
taagacttcctctaccaccaca

SEQ ID NO: 3041 - DNA, 22 bp, synthetic construct
  misc_feature 1..22: note = Synthetic
  source 1..22: mol_type = other DNA
gctttttctttttttgcatatt

SEQ ID NO: 3042 - DNA, 22 bp, synthetic construct
  misc_feature 1..22: note = Synthetic
  source 1..22: mol_type = other DNA
tccttttggcgtgatatccata

SEQ ID NO: 3043 - DNA, 22 bp, synthetic construct
  misc_feature 1..22: note = Synthetic
  source 1..22: mol_type = other DNA
gcattgttttgcatccttttgg

SEQ ID NO: 3044 - DNA, 22 bp, synthetic construct
  misc_feature 1..22: note = Synthetic
  source 1..22: mol_type = other DNA
aactaaagtgtgctttataaaa

SEQ ID NO: 3045 - DNA, 22 bp, synthetic construct
  misc_feature 1..22: note = Synthetic
  source 1..22: mol_type = other DNA
gttataaagaaagattgtaaac

SEQ ID NO: 3046 - DNA, 22 bp, synthetic construct
  misc_feature 1..22: note = Synthetic
  source 1..22: mol_type = other DNA
aaaatttataacagttataaag

SEQ ID NO: 3047 - DNA, 22 bp, synthetic construct
  misc_feature 1..22: note = Synthetic
  source 1..22: mol_type = other DNA
tttgggttgtttaaaaatttat

SEQ ID NO: 3048 - DNA, 22 bp, synthetic construct
  misc_feature 1..22: note = Synthetic
  source 1..22: mol_type = other DNA
tggaacgcattttgggttgttt

SEQ ID NO: 3049 - DNA, 22 bp, synthetic construct
  misc_feature 1..22: note = Synthetic
  source 1..22: mol_type = other DNA
atttctttatatggaacgcatt

SEQ ID NO: 3050 - DNA, 22 bp, synthetic construct
  misc_feature 1..22: note = Synthetic
  source 1..22: mol_type = other DNA
actacatgtaaaatcttgatag

SEQ ID NO: 3051 - DNA, 22 bp, synthetic construct
  misc_feature 1..22: note = Synthetic
  source 1..22: mol_type = other DNA
ataagaaaactacatgtaaaat

SEQ ID NO: 3052 - DNA, 22 bp, synthetic construct
  misc_feature 1..22: note = Synthetic
  source 1..22: mol_type = other DNA
aaagttataagaaaactacatg

SEQ ID NO: 3053 - DNA, 22 bp, synthetic construct
  misc_feature 1..22: note = Synthetic
  source 1..22: mol_type = other DNA
acacgtctatgcaattgtacaa

SEQ ID NO: 3054 - DNA, 22 bp, synthetic construct
  misc_feature 1..22: note = Synthetic
  source 1..22: mol_type = other DNA
aatggcaggttttacacgtcta

SEQ ID NO: 3055 - DNA, 22 bp, synthetic construct
  misc_feature 1..22: note = Synthetic
  source 1..22: mol_type = other DNA
tgttattgttttgttaacaatg

SEQ ID NO: 3056 - DNA, 22 bp, synthetic construct
  misc_feature 1..22: note = Synthetic
  source 1..22: mol_type = other DNA
ctaagtctgttattgttttgtt

SEQ ID NO: 3057 - DNA, 22 bp, synthetic construct
  misc_feature 1..22: note = Synthetic
  source 1..22: mol_type = other DNA
atactgtagatttcagtagttt

SEQ ID NO: 3058 - DNA, 22 bp, synthetic construct
  misc_feature 1..22: note = Synthetic
  source 1..22: mol_type = other DNA
gtggtattatactgtagatttc

SEQ ID NO: 3059 - DNA, 22 bp, synthetic construct
  misc_feature 1..22: note = Synthetic
  source 1..22: mol_type = other DNA
gtagtggtattatactgtagat

SEQ ID NO: 3060 - DNA, 22 bp, synthetic construct
  misc_feature 1..22: note = Synthetic
  source 1..22: mol_type = other DNA
tgaagggtagtggtattatact

SEQ ID NO: 3061 - DNA, 22 bp, synthetic construct
  misc_feature 1..22: note = Synthetic
  source 1..22: mol_type = other DNA
aatctatatttttgtgaagggt

SEQ ID NO: 3062 - DNA, 22 bp, synthetic construct
  misc_feature 1..22: note = Synthetic
  source 1..22: mol_type = other DNA
ataaatctatatttttgtgaag

SEQ ID NO: 3063 - DNA, 22 bp, synthetic construct
  misc_feature 1..22: note = Synthetic
  source 1..22: mol_type = other DNA
gaaataaatctatatttttgtg

SEQ ID NO: 3064 - DNA, 22 bp, synthetic construct
  misc_feature 1..22: note = Synthetic
  source 1..22: mol_type = other DNA
agacagtaagagtttacaagaa

SEQ ID NO: 3065 - DNA, 22 bp, synthetic construct
  misc_feature 1..22: note = Synthetic
  source 1..22: mol_type = other DNA
gattagacagtaagagtttaca

SEQ ID NO: 3066 - DNA, 22 bp, synthetic construct
  misc_feature 1..22: note = Synthetic
  source 1..22: mol_type = other DNA
acaacaaagaggattagacagt

SEQ ID NO: 3067 - DNA, 22 bp, synthetic construct
  misc_feature 1..22: note = Synthetic
  source 1..22: mol_type = other DNA
attcatacaacaaagaggatta

SEQ ID NO: 3068 - DNA, 22 bp, synthetic construct
  misc_feature 1..22: note = Synthetic
  source 1..22: mol_type = other DNA
tttataatattcatacaacaaa

SEQ ID NO: 3069 - DNA, 22 bp, synthetic construct
  misc_feature 1..22: note = Synthetic
  source 1..22: mol_type = other DNA
ctcctgattcccgcatggtttt

SEQ ID NO: 3070 - DNA, 22 bp, synthetic construct
  misc_feature 1..22: note = Synthetic
  source 1..22: mol_type = other DNA
gttttacaactcctgattcccg

SEQ ID NO: 3071 - DNA, 22 bp, synthetic construct
  misc_feature 1..22: note = Synthetic
  source 1..22: mol_type = other DNA
gcagaataaatgttttacaact

SEQ ID NO: 3072 - DNA, 22 bp, synthetic construct
  misc_feature 1..22: note = Synthetic
  source 1..22: mol_type = other DNA
tgacagatgaagaaggagcaga

SEQ ID NO: 3073 - DNA, 22 bp, synthetic construct
  misc_feature 1..22: note = Synthetic
  source 1..22: mol_type = other DNA
gtcatgacagatgaagaaggag

SEQ ID NO: 3074 - DNA, 22 bp, synthetic construct
  misc_feature 1..22: note = Synthetic
  source 1..22: mol_type = other DNA
ggagtccttagtatcagtcatg

SEQ ID NO: 3075 - DNA, 22 bp, synthetic construct
  misc_feature 1..22: note = Synthetic
  source 1..22: mol_type = other DNA
gcagagcgatggagtccttagt

SEQ ID NO: 3076 - DNA, 22 bp, synthetic construct
  misc_feature 1..22: note = Synthetic
  source 1..22: mol_type = other DNA
atttgggcagagcgatggagtc

SEQ ID NO: 3077 - DNA, 22 bp, synthetic construct
  misc_feature 1..22: note = Synthetic
  source 1..22: mol_type = other DNA
gcagatgatttgggcagagcga

SEQ ID NO: 3078 - DNA, 22 bp, synthetic construct
  misc_feature 1..22: note = Synthetic
  source 1..22: mol_type = other DNA
acatggcagatgatttgggcag

SEQ ID NO: 3079 - DNA, 22 bp, synthetic construct
  misc_feature 1..22: note = Synthetic
  source 1..22: mol_type = other DNA
aggaagtcttttccacatggca

SEQ ID NO: 3080 - DNA, 22 bp, synthetic construct
  misc_feature 1..22: note = Synthetic
  source 1..22: mol_type = other DNA
tgtaggaagtcttttccacatg

SEQ ID NO: 3081 - DNA, 22 bp, synthetic construct
  misc_feature 1..22: note = Synthetic
  source 1..22: mol_type = other DNA
ttgttttccaggacacaatgta

SEQ ID NO: 3082-3999 - skipped (918 entries)

SEQ ID NO: 4000 - DNA, 22 bp, synthetic construct
  misc_feature 1..22: note = Synthetic
  source 1..22: mol_type = other DNA
agcattttgaaaagtgtatatc

SEQ ID NO: 4001 - DNA, 22 bp, synthetic construct
  misc_feature 1..22: note = Synthetic
  source 1..22: mol_type = other DNA
tcaaggcagcgataaaaaaaac

SEQ ID NO: 4002 - DNA, 22 bp, synthetic construct
  misc_feature 1..22: note = Synthetic
  source 1..22: mol_type = other DNA
tcttcaaactttattgctccag

SEQ ID NO: 4003 - DNA, 22 bp, synthetic construct
  misc_feature 1..22: note = Synthetic
  source 1..22: mol_type = other DNA
ttttcctattcgtttttctccg

SEQ ID NO: 4004 - DNA, 22 bp, synthetic construct
  misc_feature 1..22: note = Synthetic
  source 1..22: mol_type = other DNA
tgcctcccagatctgagtcctg

SEQ ID NO: 4005 - DNA, 22 bp, synthetic construct
  misc_feature 1..22: note = Synthetic
  source 1..22: mol_type = other DNA
gcctcccagatctgagtcctgt

SEQ ID NO: 4006 - DNA, 22 bp, synthetic construct
  misc_feature 1..22: note = Synthetic
  source 1..22: mol_type = other DNA
cctcccagatctgagtcctgta

SEQ ID NO: 4007 - DNA, 22 bp, synthetic construct
  misc_feature 1..22: note = Synthetic
  source 1..22: mol_type = other DNA
ctcccagatctgagtcctgtag

SEQ ID NO: 4008 - DNA, 22 bp, synthetic construct
  misc_feature 1..22: note = Synthetic
  source 1..22: mol_type = other DNA
aatgctttggtgggaagaagta

SEQ ID NO: 4009 - DNA, 22 bp, synthetic construct
  misc_feature 1..22: note = Synthetic
  source 1..22: mol_type = other DNA
tacacttttcaaaatgctttgg

SEQ ID NO: 4010 - DNA, 22 bp, synthetic construct
  misc_feature 1..22: note = Synthetic
  source 1..22: mol_type = other DNA
atacacttttcaaaatgctttg

SEQ ID NO: 4011 - DNA, 22 bp, synthetic construct
  misc_feature 1..22: note = Synthetic
  source 1..22: mol_type = other DNA
gatatacacttttcaaaatgct

SEQ ID NO: 4012 - DNA, 22 bp, synthetic construct
  misc_feature 1..22: note = Synthetic
  source 1..22: mol_type = other DNA
ataaagtttgaagaacttttac

SEQ ID NO: 4013 - DNA, 22 bp, synthetic construct
  misc_feature 1..22: note = Synthetic
  source 1..22: mol_type = other DNA
tttctcattgtttttaagccta

SEQ ID NO: 4014 - DNA, 22 bp, synthetic construct
  misc_feature 1..22: note = Synthetic
  source 1..22: mol_type = other DNA
tttttaaagctgctgaagtttg

SEQ ID NO: 4015 - DNA, 22 bp, synthetic construct
  misc_feature 1..22: note = Synthetic
  source 1..22: mol_type = other DNA
attaccttcggagaaaaacgaa

SEQ ID NO: 4016 - DNA, 22 bp, synthetic construct
  misc_feature 1..22: note = Synthetic
  source 1..22: mol_type = other DNA
cagatctgggaggcaattacct

SEQ ID NO: 4017 - DNA, 22 bp, synthetic construct
  misc_feature 1..22: note = Synthetic
  source 1..22: mol_type = other DNA
cccctacaggactcagatctgg

SEQ ID NO: 4018 - DNA, 22 bp, synthetic construct
  misc_feature 1..22: note = Synthetic
  source 1..22: mol_type = other DNA
ttccccctacaggactcagatc

SEQ ID NO: 4019 - DNA, 22 bp, synthetic construct
  misc_feature 1..22: note = Synthetic
  source 1..22: mol_type = other DNA
tttccccctacaggactcagat

SEQ ID NO: 4020 - DNA, 22 bp, synthetic construct
  misc_feature 1..22: note = Synthetic
  source 1..22: mol_type = other DNA
gggatcactcactttcccccta

SEQ ID NO: 4021 - DNA, 22 bp, synthetic construct
  misc_feature 1..22: note = Synthetic
  source 1..22: mol_type = other DNA
atgggtaaatgcacaattttct

SEQ ID NO: 4022 - DNA, 22 bp, synthetic construct
  misc_feature 1..22: note = Synthetic
  source 1..22: mol_type = other DNA
tcaaaagaaaacattcacaaaa

SEQ ID NO: 4023 - DNA, 22 bp, synthetic construct
  misc_feature 1..22: note = Synthetic
  source 1..22: mol_type = other DNA
ttcaaaagaaaacattcacaaa

SEQ ID NO: 4024 - DNA, 22 bp, synthetic construct
  misc_feature 1..22: note = Synthetic
  source 1..22: mol_type = other DNA
cacataccagtttttgccctgt

SEQ ID NO: 4025 - DNA, 22 bp, synthetic construct
  misc_feature 1..22: note = Synthetic
  source 1..22: mol_type = other DNA
gtttttgccctgtcaggccttc

SEQ ID NO: 4026 - DNA, 22 bp, synthetic construct
  misc_feature 1..22: note = Synthetic
  source 1..22: mol_type = other DNA
tttgccctgtcaggccttcgag

SEQ ID NO: 4027 - DNA, 22 bp, synthetic construct
  misc_feature 1..22: note = Synthetic
  source 1..22: mol_type = other DNA
ctgtcaggccttcgaggaggtc

SEQ ID NO: 4028 - DNA, 22 bp, synthetic construct
  misc_feature 1..22: note = Synthetic
  source 1..22: mol_type = other DNA
tcaggccttcgaggaggtctag

SEQ ID NO: 4029 - DNA, 22 bp, synthetic construct
  misc_feature 1..22: note = Synthetic
  source 1..22: mol_type = other DNA
ctaggaggcgcctcccatcctg

SEQ ID NO: 4030 - DNA, 22 bp, synthetic construct
  misc_feature 1..22: note = Synthetic
  source 1..22: mol_type = other DNA
tcccatcctgtaggtcactgaa

SEQ ID NO: 4031 - DNA, 22 bp, synthetic construct
  misc_feature 1..22: note = Synthetic
  source 1..22: mol_type = other DNA
cgaaggcctgacagggcaaaaa

SEQ ID NO: 4032 - DNA, 22 bp, synthetic construct
  misc_feature 1..22: note = Synthetic
  source 1..22: mol_type = other DNA
tagacctcctcgaaggcctgac

SEQ ID NO: 4033 - DNA, 22 bp, synthetic construct
  misc_feature 1..22: note = Synthetic
  source 1..22: mol_type = other DNA
ctagacctcctcgaaggcctga

SEQ ID NO: 4034 - DNA, 22 bp, synthetic construct
  misc_feature 1..22: note = Synthetic
  source 1..22: mol_type = other DNA
aggcgcctcctagacctcctcg

SEQ ID NO: 4035 - DNA, 22 bp, synthetic construct
  misc_feature 1..22: note = Synthetic
  source 1..22: mol_type = other DNA
tcttcagtgacctacaggatgg

SEQ ID NO: 4036 - DNA, 22 bp, synthetic construct
  misc_feature 1..22: note = Synthetic
  source 1..22: mol_type = other DNA
acctcttcagtgacctacagga

SEQ ID NO: 4037 - DNA, 22 bp, synthetic construct
  misc_feature 1..22: note = Synthetic
  source 1..22: mol_type = other DNA
aacctcttcagtgacctacagg

SEQ ID NO: 4038 - DNA, 22 bp, synthetic construct
  misc_feature 1..22: note = Synthetic
  source 1..22: mol_type = other DNA
tgagaacctcttcagtgaccta

SEQ ID NO: 4039 - DNA, 22 bp, synthetic construct
  misc_feature 1..22: note = Synthetic
  source 1..22: mol_type = other DNA
gcagtgccttgttgacattgtt

SEQ ID NO: 4040 - DNA, 22 bp, synthetic construct
  misc_feature 1..22: note = Synthetic
  source 1..22: mol_type = other DNA
cagtgccttgttgacattgttc

SEQ ID NO: 4041 - DNA, 22 bp, synthetic construct
  misc_feature 1..22: note = Synthetic
  source 1..22: mol_type = other DNA
attgttcagggcatgaactctt

SEQ ID NO: 4042 - DNA, 22 bp, synthetic construct
  misc_feature 1..22: note = Synthetic
  source 1..22: mol_type = other DNA
actcttgtggatcctttttctt

SEQ ID NO: 4043 - DNA, 22 bp, synthetic construct
  misc_feature 1..22: note = Synthetic
  source 1..22: mol_type = other DNA
gaacaatgtcaacaaggcactg

SEQ ID NO: 4044 - DNA, 22 bp, synthetic construct
  misc_feature 1..22: note = Synthetic
  source 1..22: mol_type = other DNA
tgaacaatgtcaacaaggcact

SEQ ID NO: 4045 - DNA, 22 bp, synthetic construct
  misc_feature 1..22: note = Synthetic
  source 1..22: mol_type = other DNA
tcatgccctgaacaatgtcaac

SEQ ID NO: 4046 - DNA, 22 bp, synthetic construct
  misc_feature 1..22: note = Synthetic
  source 1..22: mol_type = other DNA
ttttgttctcagccaaaagaaa

SEQ ID NO: 4047 - DNA, 22 bp, synthetic construct
  misc_feature 1..22: note = Synthetic
  source 1..22: mol_type = other DNA
tcatcaggattcttacctgcca

SEQ ID NO: 4048 - DNA, 22 bp, synthetic construct
  misc_feature 1..22: note = Synthetic
  source 1..22: mol_type = other DNA
tcaggattcttacctgccagtg

SEQ ID NO: 4049 - DNA, 22 bp, synthetic construct
  misc_feature 1..22: note = Synthetic
  source 1..22: mol_type = other DNA
ttggaatataatcctccactgg

SEQ ID NO: 4050 - DNA, 22 bp, synthetic construct
  misc_feature 1..22: note = Synthetic
  source 1..22: mol_type = other DNA
tgatttggaatataatcctcca

SEQ ID NO: 4051 - DNA, 22 bp, synthetic construct
  misc_feature 1..22: note = Synthetic
  source 1..22: mol_type = other DNA
ataaactgactcttggtttgat

SEQ ID NO: 4052 - DNA, 22 bp, synthetic construct
  misc_feature 1..22: note = Synthetic
  source 1..22: mol_type = other DNA
gatggaaatcataaactgactc

SEQ ID NO: 4053 - DNA, 22 bp, synthetic construct
  misc_feature 1..22: note = Synthetic
  source 1..22: mol_type = other DNA
attggaagtactgacatcgtag

SEQ ID NO: 4054 - DNA, 22 bp, synthetic construct
  misc_feature 1..22: note = Synthetic
  source 1..22: mol_type = other DNA
taacaggttgatttagtgaata

SEQ ID NO: 4055 - DNA, 22 bp, synthetic construct
  misc_feature 1..22: note = Synthetic
  source 1..22: mol_type = other DNA
agtaatcttcttacctatgact

SEQ ID NO: 4056 - DNA, 22 bp, synthetic construct
  misc_feature 1..22: note = Synthetic
  source 1..22: mol_type = other DNA
tatggatgagagcattcaaagc

SEQ ID NO: 4057 - DNA, 22 bp, synthetic construct
  misc_feature 1..22: note = Synthetic
  source 1..22: mol_type = other DNA
caaagccaggccatcagaccag

SEQ ID NO: 4058 - DNA, 22 bp, synthetic construct
  misc_feature 1..22: note = Synthetic
  source 1..22: mol_type = other DNA
agccaggccatcagaccagctg

SEQ ID NO: 4059 - DNA, 22 bp, synthetic construct
  misc_feature 1..22: note = Synthetic
  source 1..22: mol_type = other DNA
gtgaagttgattacattaacct

SEQ ID NO: 4060 - DNA, 22 bp, synthetic construct
  misc_feature 1..22: note = Synthetic
  source 1..22: mol_type = other DNA
gtggataattacgagttgattg

SEQ ID NO: 4061 - DNA, 22 bp, synthetic construct
  misc_feature 1..22: note = Synthetic
  source 1..22: mol_type = other DNA
gagttgattgtcggacccagct

SEQ ID NO: 4062 - DNA, 22 bp, synthetic construct
  misc_feature 1..22: note = Synthetic
  source 1..22: mol_type = other DNA
gctcaggagaatcttttcactg

SEQ ID NO: 4063 - DNA, 22 bp, synthetic construct
  misc_feature 1..22: note = Synthetic
  source 1..22: mol_type = other DNA
tgaatgctctcatccatagtca

SEQ ID NO: 4064 - DNA, 22 bp, synthetic construct
  misc_feature 1..22: note = Synthetic
  source 1..22: mol_type = other DNA
caccaccagctggtctgatggc

SEQ ID NO: 4065 - DNA, 22 bp, synthetic construct
  misc_feature 1..22: note = Synthetic
  source 1..22: mol_type = other DNA
aacttcaccaccagctggtctg

SEQ ID NO: 4066 - DNA, 22 bp, synthetic construct
  misc_feature 1..22: note = Synthetic
  source 1..22: mol_type = other DNA
atgtaatcaacttcaccaccag

SEQ ID NO: 4067 - DNA, 22 bp, synthetic construct
  misc_feature 1..22: note = Synthetic
  source 1..22: mol_type = other DNA
acaatcaactcgtaattatcca

SEQ ID NO: 4068 - DNA, 22 bp, synthetic construct
  misc_feature 1..22: note = Synthetic
  source 1..22: mol_type = other DNA
cagtgaaaagattctcctgagc

SEQ ID NO: 4069 - DNA, 22 bp, synthetic construct
  misc_feature 1..22: note = Synthetic
  source 1..22: mol_type = other DNA
acagtgaaaagattctcctgag

SEQ ID NO: 4070 - DNA, 22 bp, synthetic construct
  misc_feature 1..22: note = Synthetic
  source 1..22: mol_type = other DNA
aatgtaatgaaaaatatcatgg

SEQ ID NO: 4071 - DNA, 22 bp, synthetic construct
  misc_feature 1..22: note = Synthetic
  source 1..22: mol_type = other DNA
caaaaatgtaatgaaaaatatc

SEQ ID NO: 4072 - DNA, 22 bp, synthetic construct
  misc_feature 1..22: note = Synthetic
  source 1..22: mol_type = other DNA
agtccagaaatttaccaacctt

SEQ ID NO: 4073 - DNA, 22 bp, synthetic construct
  misc_feature 1..22: note = Synthetic
  source 1..22: mol_type = other DNA
tttctctatgcctaattgatat

SEQ ID NO: 4074 - DNA, 22 bp, synthetic construct
  misc_feature 1..22: note = Synthetic
  source 1..22: mol_type = other DNA
gaatgcatgttccagtcgttgt

SEQ ID NO: 4075 - DNA, 22 bp, synthetic construct
  misc_feature 1..22: note = Synthetic
  source 1..22: mol_type = other DNA
ccagtcgttgtgtggctgactg

SEQ ID NO: 4076 - DNA, 22 bp, synthetic construct
  misc_feature 1..22: note = Synthetic
  source 1..22: mol_type = other DNA
aaaccacactattccagtcaaa

SEQ ID NO: 4077 - DNA, 22 bp, synthetic construct
  misc_feature 1..22: note = Synthetic
  source 1..22: mol_type = other DNA
acactattccagtcaaataggt

SEQ ID NO: 4078 - DNA, 22 bp, synthetic construct
  misc_feature 1..22: note = Synthetic
  source 1..22: mol_type = other DNA
agaaactactcgatcctgaagg

SEQ ID NO: 4079 - DNA, 22 bp, synthetic construct
  misc_feature 1..22: note = Synthetic
  source 1..22: mol_type = other DNA
atagagaaactactcgatcctg

SEQ ID NO: 4080 - DNA, 22 bp, synthetic construct
  misc_feature 1..22: note = Synthetic
  source 1..22: mol_type = other DNA
ttcaacatcgccagatatcaat

SEQ ID NO: 4081 - DNA, 22 bp, synthetic construct
  misc_feature 1..22: note = Synthetic
  source 1..22: mol_type = other DNA
ccagcagtcagccacacaacga

SEQ ID NO: 4082 - DNA, 22 bp, synthetic construct
  misc_feature 1..22: note = Synthetic
  source 1..22: mol_type = other DNA
agacctatttgactggaatagt

SEQ ID NO: 4083 - DNA, 22 bp, synthetic construct
  misc_feature 1..22: note = Synthetic
  source 1..22: mol_type = other DNA
gttttaggccagacctatttga

SEQ ID NO: 4084 - DNA, 22 bp, synthetic construct
  misc_feature 1..22: note = Synthetic
  source 1..22: mol_type = other DNA
aaatgttcttctttagtcactt

SEQ ID NO: 4085 - DNA, 22 bp, synthetic construct
  misc_feature 1..22: note = Synthetic
  source 1..22: mol_type = other DNA
tgttcttctttagtcactttag

SEQ ID NO: 4086 - DNA, 22 bp, synthetic construct
  misc_feature 1..22: note = Synthetic
  source 1..22: mol_type = other DNA
tctttagtcactttaggtggcc

SEQ ID NO: 4087 - DNA, 22 bp, synthetic construct
  misc_feature 1..22: note = Synthetic
  source 1..22: mol_type = other DNA
gccttggcaacatttccacttc

SEQ ID NO: 4088 - DNA, 22 bp, synthetic construct
  misc_feature 1..22: note = Synthetic
  source 1..22: mol_type = other DNA
tggcaacatttccacttcctgg

SEQ ID NO: 4089 - DNA, 22 bp, synthetic construct
  misc_feature 1..22: note = Synthetic
  source 1..22: mol_type = other DNA
atggcttcaatgctcacttgtt

SEQ ID NO: 4090 - DNA, 22 bp, synthetic construct
  misc_feature 1..22: note = Synthetic
  source 1..22: mol_type = other DNA
tgctcacttgttgaggcaaaac

SEQ ID NO: 4091 - DNA, 22 bp, synthetic construct
  misc_feature 1..22: note = Synthetic
  source 1..22: mol_type = other DNA
gagtgatgtgatgtacattaag

SEQ ID NO: 4092 - DNA, 22 bp, synthetic construct
  misc_feature 1..22: note = Synthetic
  source 1..22: mol_type = other DNA
tacattaagatggacttcttat

SEQ ID NO: 4093 - DNA, 22 bp, synthetic construct
  misc_feature 1..22: note = Synthetic
  source 1..22: mol_type = other DNA
taagatggacttcttatctgga

SEQ ID NO: 4094 - DNA, 22 bp, synthetic construct
  misc_feature 1..22: note = Synthetic
  source 1..22: mol_type = other DNA
gatggacttcttatctggatag

SEQ ID NO: 4095 - DNA, 22 bp, synthetic construct
  misc_feature 1..22: note = Synthetic
  source 1..22: mol_type = other DNA
tcatcaaatgcactattctcaa

SEQ ID NO: 4096 - DNA, 22 bp, synthetic construct
  misc_feature 1..22: note = Synthetic
  source 1..22: mol_type = other DNA
tccaggaagtggaaatgttgcc

SEQ ID NO: 4097 - DNA, 22 bp, synthetic construct
  misc_feature 1..22: note = Synthetic
  source 1..22: mol_type = other DNA
gagcattgaagccatccaggaa

SEQ ID NO: 4098 - DNA, 22 bp, synthetic construct
  misc_feature 1..22: note = Synthetic
  source 1..22: mol_type = other DNA
acaagtgagcattgaagccatc

SEQ ID NO: 4099 - DNA, 22 bp, synthetic construct
  misc_feature 1..22: note = Synthetic
  source 1..22: mol_type = other DNA
agtaaatgttgacagacctgtg

SEQ ID NO: 4100 - DNA, 22 bp, synthetic construct
  misc_feature 1..22: note = Synthetic
  source 1..22: mol_type = other DNA
tgttgacagacctgtgaaggaa

SEQ ID NO: 4101 - DNA, 22 bp, synthetic construct
  misc_feature 1..22: note = Synthetic
  source 1..22: mol_type = other DNA
gttgacagacctgtgaaggaaa

SEQ ID NO: 4102 - DNA, 22 bp, synthetic construct
  misc_feature 1..22: note = Synthetic
  source 1..22: mol_type = other DNA
tgtgaaggaaatgggctccgtg

SEQ ID NO: 4103 - DNA, 22 bp, synthetic construct
  misc_feature 1..22: note = Synthetic
  source 1..22: mol_type = other DNA
gtgaaggaaatgggctccgtgt

SEQ ID NO: 4104 - DNA, 22 bp, synthetic construct
  misc_feature 1..22: note = Synthetic
  source 1..22: mol_type = other DNA
aaatgggctccgtgtagggtca

SEQ ID NO: 4105 - DNA, 22 bp, synthetic construct
  misc_feature 1..22: note = Synthetic
  source 1..22: mol_type = other DNA
tgggctccgtgtagggtcagag

SEQ ID NO: 4106 - DNA, 22 bp, synthetic construct
  misc_feature 1..22: note = Synthetic
  source 1..22: mol_type = other DNA
ggtgacataagcagcctgtgtg

SEQ ID NO: 4107 - DNA, 22 bp, synthetic construct
  misc_feature 1..22: note = Synthetic
  source 1..22: mol_type = other DNA
gtgtaggcatagctcttgaatc

SEQ ID NO: 4108 - DNA, 22 bp, synthetic construct
  misc_feature 1..22: note = Synthetic
  source 1..22: mol_type = other DNA
gcatagctcttgaatcgaggct

SEQ ID NO: 4109 - DNA, 22 bp, synthetic construct
  misc_feature 1..22: note = Synthetic
  source 1..22: mol_type = other DNA
catagctcttgaatcgaggctt

SEQ ID NO: 4110 - DNA, 22 bp, synthetic construct
  misc_feature 1..22: note = Synthetic
  source 1..22: mol_type = other DNA
atagctcttgaatcgaggctta

SEQ ID NO: 4111 - DNA, 22 bp, synthetic construct
  misc_feature 1..22: note = Synthetic
  source 1..22: mol_type = other DNA
tacacggagcccatttccttca

SEQ ID NO: 4112 - DNA, 22 bp, synthetic construct
  misc_feature 1..22: note = Synthetic
  source 1..22: mol_type = other DNA
atgtcaccacctctgaccctac

SEQ ID NO: 4113 - DNA, 22 bp, synthetic construct
  misc_feature 1..22: note = Synthetic
  source 1..22: mol_type = other DNA
attcaagagctatgcctacaca

SEQ ID NO: 4114 - DNA, 22 bp, synthetic construct
  misc_feature 1..22: note = Synthetic
  source 1..22: mol_type = other DNA
cagatcacggtcagtctagcac

SEQ ID NO: 4115 - DNA, 22 bp, synthetic construct
  misc_feature 1..22: note = Synthetic
  source 1..22: mol_type = other DNA
gcagatcacggtcagtctagca

SEQ ID NO: 4116 - DNA, 22 bp, synthetic construct
  misc_feature 1..22: note = Synthetic
  source 1..22: mol_type = other DNA
cccaaacccttctctgcagatc

SEQ ID NO: 4117 - DNA, 22 bp, synthetic construct
  misc_feature 1..22: note = Synthetic
  source 1..22: mol_type = other DNA
agtttacctcatgagtatgaaa

SEQ ID NO: 4118 - DNA, 22 bp, synthetic construct
  misc_feature 1..22: note = Synthetic
  source 1..22: mol_type = other DNA
cttcttctaaagctgtttgata

SEQ ID NO: 4119 - DNA, 22 bp, synthetic construct
  misc_feature 1..22: note = Synthetic
  source 1..22: mol_type = other DNA
ctaaagctgtttgataacggtc

SEQ ID NO: 4120 - DNA, 22 bp, synthetic construct
  misc_feature 1..22: note = Synthetic
  source 1..22: mol_type = other DNA
gaactgccaaatgacttgtctt

SEQ ID NO: 4121 - DNA, 22 bp, synthetic construct
  misc_feature 1..22: note = Synthetic
  source 1..22: mol_type = other DNA
gaaagaccagtttcatactcat

SEQ ID NO: 4122 - DNA, 22 bp, synthetic construct
  misc_feature 1..22: note = Synthetic
  source 1..22: mol_type = other DNA
agagatttctaatgatgtggaa

SEQ ID NO: 4123 - DNA, 22 bp, synthetic construct
  misc_feature 1..22: note = Synthetic
  source 1..22: mol_type = other DNA
acaaggagagatttctaatgat

SEQ ID NO: 4124 - DNA, 22 bp, synthetic construct
  misc_feature 1..22: note = Synthetic
  source 1..22: mol_type = other DNA
gctgaggacacattgcaagcac

SEQ ID NO: 4125 - DNA, 22 bp, synthetic construct
  misc_feature 1..22: note = Synthetic
  source 1..22: mol_type = other DNA
attatcgtggcttctttctgct

SEQ ID NO: 4126 - DNA, 22 bp, synthetic construct
  misc_feature 1..22: note = Synthetic
  source 1..22: mol_type = other DNA
cagctttagaagaagtattatc

SEQ ID NO: 4127 - DNA, 22 bp, synthetic construct
  misc_feature 1..22: note = Synthetic
  source 1..22: mol_type = other DNA
attgatggagagtgaagtaaac

SEQ ID NO: 4128 - DNA, 22 bp, synthetic construct
  misc_feature 1..22: note = Synthetic
  source 1..22: mol_type = other DNA
caagtcatttggcagttcattg

SEQ ID NO: 4129 - DNA, 22 bp, synthetic construct
  misc_feature 1..22: note = Synthetic
  source 1..22: mol_type = other DNA
gaagctcctgaagacaagtcat

SEQ ID NO: 4130 - DNA, 22 bp, synthetic construct
  misc_feature 1..22: note = Synthetic
  source 1..22: mol_type = other DNA
aatttattttattgtgcagcat

SEQ ID NO: 4131 - DNA, 22 bp, synthetic construct
  misc_feature 1..22: note = Synthetic
  source 1..22: mol_type = other DNA
gtttttccatgctagctaccct

SEQ ID NO: 4132 - DNA, 22 bp, synthetic construct
  misc_feature 1..22: note = Synthetic
  source 1..22: mol_type = other DNA
tgaggcattcccatcttgaatt

SEQ ID NO: 4133 - DNA, 22 bp, synthetic construct
  misc_feature 1..22: note = Synthetic
  source 1..22: mol_type = other DNA
ccaattgtagaatattaccaac

SEQ ID NO: 4134 - DNA, 22 bp, synthetic construct
  misc_feature 1..22: note = Synthetic
  source 1..22: mol_type = other DNA
gaatattaccaacccggccctg

SEQ ID NO: 4135 - DNA, 22 bp, synthetic construct
  misc_feature 1..22: note = Synthetic
  source 1..22: mol_type = other DNA
aatattaccaacccggccctga

SEQ ID NO: 4136 - DNA, 22 bp, synthetic construct
  misc_feature 1..22: note = Synthetic
  source 1..22: mol_type = other DNA
ggaatgcctcagggtagctagc

SEQ ID NO: 4137 - DNA, 22 bp, synthetic construct
  misc_feature 1..22: note = Synthetic
  source 1..22: mol_type = other DNA
aaattcaagatgggaatgcctc

SEQ ID NO: 4138 - DNA, 22 bp, synthetic construct
  misc_feature 1..22: note = Synthetic
  source 1..22: mol_type = other DNA
taaattcaagatgggaatgcct

SEQ ID NO: 4139 - DNA, 22 bp, synthetic construct
  misc_feature 1..22: note = Synthetic
  source 1..22: mol_type = other DNA
gatgaatctcctaaattcaaga

SEQ ID NO: 4140 - DNA, 22 bp, synthetic construct
  misc_feature 1..22: note = Synthetic
  source 1..22: mol_type = other DNA
agatgaatctcctaaattcaag

SEQ ID NO: 4141 - DNA, 22 bp, synthetic construct
  misc_feature 1..22: note = Synthetic
  source 1..22: mol_type = other DNA
ttgggaagtaagctgattggaa

SEQ ID NO: 4142 - DNA, 22 bp, synthetic construct
  misc_feature 1..22: note = Synthetic
  source 1..22: mol_type = other DNA
ctacaattgggaagtaagctga

SEQ ID NO: 4143 - DNA, 22 bp, synthetic construct
  misc_feature 1..22: note = Synthetic
  source 1..22: mol_type = other DNA
cgggttggtaatattctacaat

SEQ ID NO: 4144 - DNA, 22 bp, synthetic construct
  misc_feature 1..22: note = Synthetic
  source 1..22: mol_type = other DNA
ccgggttggtaatattctacaa

SEQ ID NO: 4145 - DNA, 22 bp, synthetic construct
  misc_feature 1..22: note = Synthetic
  source 1..22: mol_type = other DNA
ttgacagcccatcagggccggg

SEQ ID NO: 4146 - DNA, 22 bp, synthetic construct
  misc_feature 1..22: note = Synthetic
  source 1..22: mol_type = other DNA
ggatttgacagcccatcagggc

SEQ ID NO: 4147 - DNA, 22 bp, synthetic construct
  misc_feature 1..22: note = Synthetic
  source 1..22: mol_type = other DNA
tggatttgacagcccatcaggg

SEQ ID NO: 4148 - DNA, 22 bp, synthetic construct
  misc_feature 1..22: note = Synthetic
  source 1..22: mol_type = other DNA
atgatggatttgacagcccatc

SEQ ID NO: 4149 - DNA, 22 bp, synthetic construct
  misc_feature 1..22: note = Synthetic
  source 1..22: mol_type = other DNA
catgatggatttgacagcccat

SEQ ID NO: 4150 - DNA, 22 bp, synthetic construct
  misc_feature 1..22: note = Synthetic
  source 1..22: mol_type = other DNA
ccttctttgtcaggggtacatg

SEQ ID NO: 4151 - DNA, 22 bp, synthetic construct
  misc_feature 1..22: note = Synthetic
  source 1..22: mol_type = other DNA
cacctaccttatgttgttgtac

SEQ ID NO: 4152 - DNA, 22 bp, synthetic construct
  misc_feature 1..22: note = Synthetic
  source 1..22: mol_type = other DNA
tatgttgttgtacttggcgttt

SEQ ID NO: 4153 - DNA, 22 bp, synthetic construct
  misc_feature 1..22: note = Synthetic
  source 1..22: mol_type = other DNA
tggcgttttaggtcttcaagat

SEQ ID NO: 4154 - DNA, 22 bp, synthetic construct
  misc_feature 1..22: note = Synthetic
  source 1..22: mol_type = other DNA
aggtcttcaagatcaggtccaa

SEQ ID NO: 4155 - DNA, 22 bp, synthetic construct
  misc_feature 1..22: note = Synthetic
  source 1..22: mol_type = other DNA
tcaactctttcagtttctgatt

SEQ ID NO: 4156 - DNA, 22 bp, synthetic construct
  misc_feature 1..22: note = Synthetic
  source 1..22: mol_type = other DNA
cgccaagtacaacaacataagg

SEQ ID NO: 4157 - DNA, 22 bp, synthetic construct
  misc_feature 1..22: note = Synthetic
  source 1..22: mol_type = other DNA
aaaacgccaagtacaacaacat

SEQ ID NO: 4158 - DNA, 22 bp, synthetic construct
  misc_feature 1..22: note = Synthetic
  source 1..22: mol_type = other DNA
aggaaaatggaggaagagcctc

SEQ ID NO: 4159 - DNA, 22 bp, synthetic construct
  misc_feature 1..22: note = Synthetic
  source 1..22: mol_type = other DNA
agaagaaagaacaaggaaaatg

SEQ ID NO: 4160 - DNA, 22 bp, synthetic construct
  misc_feature 1..22: note = Synthetic
  source 1..22: mol_type = other DNA
aacagaagaaagaacaaggaaa

SEQ ID NO: 4161 - DNA, 22 bp, synthetic construct
  misc_feature 1..22: note = Synthetic
  source 1..22: mol_type = other DNA
taacaaaaacagaagaaagaac

SEQ ID NO: 4162 - DNA, 22 bp, synthetic construct
  misc_feature 1..22: note = Synthetic
  source 1..22: mol_type = other DNA
agaaactgaaagagttgaatga

SEQ ID NO: 4163 - DNA, 22 bp, synthetic construct
  misc_feature 1..22: note = Synthetic
  source 1..22: mol_type = other DNA
tttcagtttacatagagtttta

SEQ ID NO: 4164 - DNA, 22 bp, synthetic construct
  misc_feature 1..22: note = Synthetic
  source 1..22: mol_type = other DNA
tgctgctttggaagaacaactt

SEQ ID NO: 4165 - DNA, 22 bp, synthetic construct
  misc_feature 1..22: note = Synthetic
  source 1..22: mol_type = other DNA
tggagatcacgcaactgctgct

SEQ ID NO: 4166 - DNA, 22 bp, synthetic construct
  misc_feature 1..22: note = Synthetic
  source 1..22: mol_type = other DNA
gtggtggtagttgatgaatcta

SEQ ID NO: 4167 - DNA, 22 bp, synthetic construct
  misc_feature 1..22: note = Synthetic
  source 1..22: mol_type = other DNA
caattctctcactcacatggtg

SEQ ID NO: 4168 - DNA, 22 bp, synthetic construct
  misc_feature 1..22: note = Synthetic
  source 1..22: mol_type = other DNA
ggtcaattctctcactcacatg

SEQ ID NO: 4169 - DNA, 22 bp, synthetic construct
  misc_feature 1..22: note = Synthetic
  source 1..22: mol_type = other DNA
cagggtcaattctctcactcac

SEQ ID NO: 4170 - DNA, 22 bp, synthetic construct
  misc_feature 1..22: note = Synthetic
  source 1..22: mol_type = other DNA
agatctagaacaagaacaagtc

SEQ ID NO: 4171 - DNA, 22 bp, synthetic construct
  misc_feature 1..22: note = Synthetic
  source 1..22: mol_type = other DNA
aagatctagaacaagaacaagt

SEQ ID NO: 4172 - DNA, 22 bp, synthetic construct
  misc_feature 1..22: note = Synthetic
  source 1..22: mol_type = other DNA
cagtaagacgttgccatttgag

SEQ ID NO: 4173 - DNA, 22 bp, synthetic construct
  misc_feature 1..22: note = Synthetic
  source 1..22: mol_type = other DNA
ggatgtcttgtaaaagaaccca

SEQ ID NO: 4174 - DNA, 22 bp, synthetic construct
  misc_feature 1..22: note = Synthetic
  source 1..22: mol_type = other DNA
ttgcccatcgatctcccaatac

SEQ ID NO: 4175 - DNA, 22 bp, synthetic construct
  misc_feature 1..22: note = Synthetic
  source 1..22: mol_type = other DNA
atggcaacgtcttactgaagaa

SEQ ID NO: 4176 - DNA, 22 bp, synthetic construct
  misc_feature 1..22: note = Synthetic
  source 1..22: mol_type = other DNA
ttttacaagacatccttctcaa

SEQ ID NO: 4177 - DNA, 22 bp, synthetic construct
  misc_feature 1..22: note = Synthetic
  source 1..22: mol_type = other DNA
ctgtagatggacagaagaccgc

SEQ ID NO: 4178 - DNA, 22 bp, synthetic construct
  misc_feature 1..22: note = Synthetic
  source 1..22: mol_type = other DNA
tctgtagatggacagaagaccg

SEQ ID NO: 4179 - DNA, 22 bp, synthetic construct
  misc_feature 1..22: note = Synthetic
  source 1..22: mol_type = other DNA
atcgatgggcaaacatctgtag

SEQ ID NO: 4180 - DNA, 22 bp, synthetic construct
  misc_feature 1..22: note = Synthetic
  source 1..22: mol_type = other DNA
tctccaggtattgggagatcga

SEQ ID NO: 4181 - DNA, 22 bp, synthetic construct
  misc_feature 1..22: note = Synthetic
  source 1..22: mol_type = other DNA
ttctccaggtattgggagatcg

SEQ ID NO: 4182 - DNA, 22 bp, synthetic construct
  misc_feature 1..22: note = Synthetic
  source 1..22: mol_type = other DNA
tgattgtctcttctccaggtat

SEQ ID NO: 4183 - DNA, 22 bp, synthetic construct
  misc_feature 1..22: note = Synthetic
  source 1..22: mol_type = other DNA
ttgattgtctcttctccaggta

SEQ ID NO: 4184 - DNA, 22 bp, synthetic construct
  misc_feature 1..22: note = Synthetic
  source 1..22: mol_type = other DNA
tttctgaaagccatgcactaaa

SEQ ID NO: 4185 - DNA, 22 bp, synthetic construct
  misc_feature 1..22: note = Synthetic
  source 1..22: mol_type = other DNA
aatgttatcaagtcttcaaaaa

SEQ ID NO: 4186 - DNA, 22 bp, synthetic construct
  misc_feature 1..22: note = Synthetic
  source 1..22: mol_type = other DNA
gcagtgaacaagattcacacaa

SEQ ID NO: 4187 - DNA, 22 bp, synthetic construct
  misc_feature 1..22: note = Synthetic
  source 1..22: mol_type = other DNA
tcttgcagtgcctttttagtgc

SEQ ID NO: 4188 - DNA, 22 bp, synthetic construct
  misc_feature 1..22: note = Synthetic
  source 1..22: mol_type = other DNA
gtgctgtactcttttcaagttt

SEQ ID NO: 4189 - DNA, 22 bp, synthetic construct
  misc_feature 1..22: note = Synthetic
  source 1..22: mol_type = other DNA
tttggactaaattatcccaaca

SEQ ID NO: 4190 - DNA, 22 bp, synthetic construct
  misc_feature 1..22: note = Synthetic
  source 1..22: mol_type = other DNA
ttggactaaattatcccaacac

SEQ ID NO: 4191 - DNA, 22 bp, synthetic construct
  misc_feature 1..22: note = Synthetic
  source 1..22: mol_type = other DNA
tatccagccatgcttccgtctt

SEQ ID NO: 4192 - DNA, 22 bp, synthetic construct
  misc_feature 1..22: note = Synthetic
  source 1..22: mol_type = other DNA
atccagccatgcttccgtcttc

SEQ ID NO: 4193 - DNA, 22 bp, synthetic construct
  misc_feature 1..22: note = Synthetic
  source 1..22: mol_type = other DNA
tttgagtgaatacagtttgccc

SEQ ID NO: 4194 - DNA, 22 bp, synthetic construct
  misc_feature 1..22: note = Synthetic
  source 1..22: mol_type = other DNA
aaaacttgaaaagagtacagca

SEQ ID NO: 4195 - DNA, 22 bp, synthetic construct
  misc_feature 1..22: note = Synthetic
  source 1..22: mol_type = other DNA
gctggataactttgcccggtgt

SEQ ID NO: 4196 - DNA, 22 bp, synthetic construct
  misc_feature 1..22: note = Synthetic
  source 1..22: mol_type = other DNA
ggctggataactttgcccggtg

SEQ ID NO: 4197 - DNA, 22 bp, synthetic construct
  misc_feature 1..22: note = Synthetic
  source 1..22: mol_type = other DNA
aagcatggctggataactttgc

SEQ ID NO: 4198 - DNA, 22 bp, synthetic construct
  misc_feature 1..22: note = Synthetic
  source 1..22: mol_type = other DNA
gacccagaagacggaagcatgg

SEQ ID NO: 4199 - DNA, 22 bp, synthetic construct
  misc_feature 1..22: note = Synthetic
  source 1..22: mol_type = other DNA
cagtgacccagaagacggaagc

SEQ ID NO: 4200 - DNA, 22 bp, synthetic construct
  misc_feature 1..22: note = Synthetic
  source 1..22: mol_type = other DNA
gaataagtcagtgacccagaag

SEQ ID NO: 4201 - DNA, 22 bp, synthetic construct
  misc_feature 1..22: note = Synthetic
  source 1..22: mol_type = other DNA
ctagaaaagaaaaagcaatcca

SEQ ID NO: 4202 - DNA, 22 bp, synthetic construct
  misc_feature 1..22: note = Synthetic
  source 1..22: mol_type = other DNA
tctagaaaagaaaaagcaatcc

SEQ ID NO: 4203 - DNA, 22 bp, synthetic construct
  misc_feature 1..22: note = Synthetic
  source 1..22: mol_type = other DNA
cttgttttaacaggttttaaaa

SEQ ID NO: 4204 - DNA, 22 bp, synthetic construct
  misc_feature 1..22: note = Synthetic
  source 1..22: mol_type = other DNA
ccacagtaatctgcctcttctt

SEQ ID NO: 4205 - DNA, 22 bp, synthetic construct
  misc_feature 1..22: note = Synthetic
  source 1..22: mol_type = other DNA
cacagtaatctgcctcttcttt

SEQ ID NO: 4206 - DNA, 22 bp, synthetic construct
  misc_feature 1..22: note = Synthetic
  source 1..22: mol_type = other DNA
acagtaatctgcctcttctttt

SEQ ID NO: 4207 - DNA, 22 bp, synthetic construct
  misc_feature 1..22: note = Synthetic
  source 1..22: mol_type = other DNA
gtaatctgcctcttcttttggg

SEQ ID NO: 4208 - DNA, 22 bp, synthetic construct
  misc_feature 1..22: note = Synthetic
  source 1..22: mol_type = other DNA
atctgcctcttcttttggggag

SEQ ID NO: 4209 - DNA, 22 bp, synthetic construct
  misc_feature 1..22: note = Synthetic
  source 1..22: mol_type = other DNA
tgcctcttcttttggggaggtg

SEQ ID NO: 4210 - DNA, 22 bp, synthetic construct
  misc_feature 1..22: note = Synthetic
  source 1..22: mol_type = other DNA
ctcttcttttggggaggtggtg

SEQ ID NO: 4211 - DNA, 22 bp, synthetic construct
  misc_feature 1..22: note = Synthetic
  source 1..22: mol_type = other DNA
gttcctcttgagcatgctttac

SEQ ID NO: 4212 - DNA, 22 bp, synthetic construct
  misc_feature 1..22: note = Synthetic
  source 1..22: mol_type = other DNA
ctttaccaggatctgttccctt

SEQ ID NO: 4213 - DNA, 22 bp, synthetic construct
  misc_feature 1..22: note = Synthetic
  source 1..22: mol_type = other DNA
attacagttgtctgtgttagtg

SEQ ID NO: 4214 - DNA, 22 bp, synthetic construct
  misc_feature 1..22: note = Synthetic
  source 1..22: mol_type = other DNA
tgtctgtgttagtgatggctga

SEQ ID NO: 4215 - DNA, 22 bp, synthetic construct
  misc_feature 1..22: note = Synthetic
  source 1..22: mol_type = other DNA
ctgtgttagtgatggctgagtg

SEQ ID NO: 4216 - DNA, 22 bp, synthetic construct
  misc_feature 1..22: note = Synthetic
  source 1..22: mol_type = other DNA
ctgtggattctgaaattaggaa

SEQ ID NO: 4217 - DNA, 22 bp, synthetic construct
  misc_feature 1..22: note = Synthetic
  source 1..22: mol_type = other DNA
agattactgtggattctgaaat

SEQ ID NO: 4218 - DNA, 22 bp, synthetic construct
  misc_feature 1..22: note = Synthetic
  source 1..22: mol_type = other DNA
ccaaaagaagaggcagattact

SEQ ID NO: 4219 - DNA, 22 bp, synthetic construct
  misc_feature 1..22: note = Synthetic
  source 1..22: mol_type = other DNA
caccaccacctccccaaaagaa

SEQ ID NO: 4220 - DNA, 22 bp, synthetic construct
  misc_feature 1..22: note = Synthetic
  source 1..22: mol_type = other DNA
gatcctggtaaagcatgctcaa

SEQ ID NO: 4221 - DNA, 22 bp, synthetic construct
  misc_feature 1..22: note = Synthetic
  source 1..22: mol_type = other DNA
ggtgaccacaagggaacagatc

SEQ ID NO: 4222 - DNA, 22 bp, synthetic construct
  misc_feature 1..22: note = Synthetic
  source 1..22: mol_type = other DNA
aacagtaactacggtgaccaca

SEQ ID NO: 4223 - DNA, 22 bp, synthetic construct
  misc_feature 1..22: note = Synthetic
  source 1..22: mol_type = other DNA
aaacagtaactacggtgaccac

SEQ ID NO: 4224 - DNA, 22 bp, synthetic construct
  misc_feature 1..22: note = Synthetic
  source 1..22: mol_type = other DNA
aactgtaatggaaacagtaact

SEQ ID NO: 4225 - DNA, 22 bp, synthetic construct
  misc_feature 1..22: note = Synthetic
  source 1..22: mol_type = other DNA
atcactaacacagacaactgta

SEQ ID NO: 4226 - DNA, 22 bp, synthetic construct
  misc_feature 1..22: note = Synthetic
  source 1..22: mol_type = other DNA
tcaatacttctcacagatttca

SEQ ID NO: 4227 - DNA, 22 bp, synthetic construct
  misc_feature 1..22: note = Synthetic
  source 1..22: mol_type = other DNA
tccttccgaaagattgcaaatt

SEQ ID NO: 4228 - DNA, 22 bp, synthetic construct
  misc_feature 1..22: note = Synthetic
  source 1..22: mol_type = other DNA
gacttaaaagaaaaagtcaatg

SEQ ID NO: 4229 - DNA, 22 bp, synthetic construct
  misc_feature 1..22: note = Synthetic
  source 1..22: mol_type = other DNA
gaatttgcaatctttcggaagg

SEQ ID NO: 4230 - DNA, 22 bp, synthetic construct
  misc_feature 1..22: note = Synthetic
  source 1..22: mol_type = other DNA
tcctgaatttgcaatctttcgg

SEQ ID NO: 4231 - DNA, 22 bp, synthetic construct
  misc_feature 1..22: note = Synthetic
  source 1..22: mol_type = other DNA
agagtcctgaatttgcaatctt

SEQ ID NO: 4232 - DNA, 22 bp, synthetic construct
  misc_feature 1..22: note = Synthetic
  source 1..22: mol_type = other DNA
ttgatataactgaacttcacag

SEQ ID NO: 4233 - DNA, 22 bp, synthetic construct
  misc_feature 1..22: note = Synthetic
  source 1..22: mol_type = other DNA
taccattcaccatctgttccac

SEQ ID NO: 4234 - DNA, 22 bp, synthetic construct
  misc_feature 1..22: note = Synthetic
  source 1..22: mol_type = other DNA
accattcaccatctgttccacc

SEQ ID NO: 4235 - DNA, 22 bp, synthetic construct
  misc_feature 1..22: note = Synthetic
  source 1..22: mol_type = other DNA
caccagggcctgagctgatctg

SEQ ID NO: 4236 - DNA, 22 bp, synthetic construct
  misc_feature 1..22: note = Synthetic
  source 1..22: mol_type = other DNA
cttctcagctttttctcgctct

SEQ ID NO: 4237 - DNA, 22 bp, synthetic construct
  misc_feature 1..22: note = Synthetic
  source 1..22: mol_type = other DNA
gccctggtggaacagatggtga

SEQ ID NO: 4238 - DNA, 22 bp, synthetic construct
  misc_feature 1..22: note = Synthetic
  source 1..22: mol_type = other DNA
agctcaggccctggtggaacag

SEQ ID NO: 4239 - DNA, 22 bp, synthetic construct
  misc_feature 1..22: note = Synthetic
  source 1..22: mol_type = other DNA
cagcagatcagctcaggccctg

SEQ ID NO: 4240 - DNA, 22 bp, synthetic construct
  misc_feature 1..22: note = Synthetic
  source 1..22: mol_type = other DNA
tgccagcagatcagctcaggcc

SEQ ID NO: 4241 - DNA, 22 bp, synthetic construct
  misc_feature 1..22: note = Synthetic
  source 1..22: mol_type = other DNA
gcaagatgccagcagatcagct

SEQ ID NO: 4242 - DNA, 22 bp, synthetic construct
  misc_feature 1..22: note = Synthetic
  source 1..22: mol_type = other DNA
tttaactgacttttaattgctg

SEQ ID NO: 4243 - DNA, 22 bp, synthetic construct
  misc_feature 1..22: note = Synthetic
  source 1..22: mol_type = other DNA
cttttaattgctgttggctctg

SEQ ID NO: 4244 - DNA, 22 bp, synthetic construct
  misc_feature 1..22: note = Synthetic
  source 1..22: mol_type = other DNA
ttttaattgctgttggctctga

SEQ ID NO: 4245 - DNA, 22 bp, synthetic construct
  misc_feature 1..22: note = Synthetic
  source 1..22: mol_type = other DNA
tttaattgctgttggctctgat

SEQ ID NO: 4246 - DNA, 22 bp, synthetic construct
  misc_feature 1..22: note = Synthetic
  source 1..22: mol_type = other DNA
aattgctgttggctctgatggg

SEQ ID NO: 4247 - DNA, 22 bp, synthetic construct
  misc_feature 1..22: note = Synthetic
  source 1..22: mol_type = other DNA
tgctgttggctctgatggggtg

SEQ ID NO: 4248 - DNA, 22 bp, synthetic construct
  misc_feature 1..22: note = Synthetic
  source 1..22: mol_type = other DNA
gctgttggctctgatggggtgg

SEQ ID NO: 4249 - DNA, 22 bp, synthetic construct
  misc_feature 1..22: note = Synthetic
  source 1..22: mol_type = other DNA
ttggctctgatggggtggtggg

SEQ ID NO: 4250 - DNA, 22 bp, synthetic construct
  misc_feature 1..22: note = Synthetic
  source 1..22: mol_type = other DNA
agttaagtctctcacttagcaa

SEQ ID NO: 4251 - DNA, 22 bp, synthetic construct
  misc_feature 1..22: note = Synthetic
  source 1..22: mol_type = other DNA
gcaactggcagaattcgatcca

SEQ ID NO: 4252 - DNA, 22 bp, synthetic construct
  misc_feature 1..22: note = Synthetic
  source 1..22: mol_type = other DNA
ccaccggctgttcagttgttct

SEQ ID NO: 4253 - DNA, 22 bp, synthetic construct
  misc_feature 1..22: note = Synthetic
  source 1..22: mol_type = other DNA
taaaagtcagttaaaaatttgt

SEQ ID NO: 4254 - DNA, 22 bp, synthetic construct
  misc_feature 1..22: note = Synthetic
  source 1..22: mol_type = other DNA
agatgacaactactgctgaaaa

SEQ ID NO: 4255 - DNA, 22 bp, synthetic construct
  misc_feature 1..22: note = Synthetic
  source 1..22: mol_type = other DNA
tttctataatcagctacaacaa

SEQ ID NO: 4256 - DNA, 22 bp, synthetic construct
  misc_feature 1..22: note = Synthetic
  source 1..22: mol_type = other DNA
gctaagtgagagacttaactgg

SEQ ID NO: 4257 - DNA, 22 bp, synthetic construct
  misc_feature 1..22: note = Synthetic
  source 1..22: mol_type = other DNA
agttgctaagtgagagacttaa

SEQ ID NO: 4258 - DNA, 22 bp, synthetic construct
  misc_feature 1..22: note = Synthetic
  source 1..22: mol_type = other DNA
cctcagaacaactgaacagccg

SEQ ID NO: 4259 - DNA, 22 bp, synthetic construct
  misc_feature 1..22: note = Synthetic
  source 1..22: mol_type = other DNA
aagcctcagaacaactgaacag

SEQ ID NO: 4260 - DNA, 22 bp, synthetic construct
  misc_feature 1..22: note = Synthetic
  source 1..22: mol_type = other DNA
acttgtctgtagctctttctct

SEQ ID NO: 4261 - DNA, 22 bp, synthetic construct
  misc_feature 1..22: note = Synthetic
  source 1..22: mol_type = other DNA
gacttgcttaaaatgatttgta

SEQ ID NO: 4262 - DNA, 22 bp, synthetic construct
  misc_feature 1..22: note = Synthetic
  source 1..22: mol_type = other DNA
taaaggccacaaagtctgcatc

SEQ ID NO: 4263 - DNA, 22 bp, synthetic construct
  misc_feature 1..22: note = Synthetic
  source 1..22: mol_type = other DNA
cacaaagtctgcatccaggaac

SEQ ID NO: 4264 - DNA, 22 bp, synthetic construct
  misc_feature 1..22: note = Synthetic
  source 1..22: mol_type = other DNA
acaaagtctgcatccaggaaca

SEQ ID NO: 4265 - DNA, 22 bp, synthetic construct
  misc_feature 1..22: note = Synthetic
  source 1..22: mol_type = other DNA
tgggtccttgtcctttctcttt

SEQ ID NO: 4266 - DNA, 22 bp, synthetic construct
  misc_feature 1..22: note = Synthetic
  source 1..22: mol_type = other DNA
gggtccttgtcctttctctttc

SEQ ID NO: 4267 - DNA, 22 bp, synthetic construct
  misc_feature 1..22: note = Synthetic
  source 1..22: mol_type = other DNA
tgaatttttaatcgttcaattt

SEQ ID NO: 4268 - DNA, 22 bp, synthetic construct
  misc_feature 1..22: note = Synthetic
  source 1..22: mol_type = other DNA
tttgaggttgaagatctgatag

SEQ ID NO: 4269 - DNA, 22 bp, synthetic construct
  misc_feature 1..22: note = Synthetic
  source 1..22: mol_type = other DNA
taagcaagtcttttctgatgtg

SEQ ID NO: 4270 - DNA, 22 bp, synthetic construct
  misc_feature 1..22: note = Synthetic
  source 1..22: mol_type = other DNA
catgttcctggatgcagacttt

SEQ ID NO: 4271 - DNA, 22 bp, synthetic construct
  misc_feature 1..22: note = Synthetic
  source 1..22: mol_type = other DNA
gaaaggacaaggacccatgttc

SEQ ID NO: 4272 - DNA, 22 bp, synthetic construct
  misc_feature 1..22: note = Synthetic
  source 1..22: mol_type = other DNA
atagccctgaaagagaaaggac

SEQ ID NO: 4273 - DNA, 22 bp, synthetic construct
  misc_feature 1..22: note = Synthetic
  source 1..22: mol_type = other DNA
caaagcatagccctgaaagaga

SEQ ID NO: 4274 - DNA, 22 bp, synthetic construct
  misc_feature 1..22: note = Synthetic
  source 1..22: mol_type = other DNA
ctatggcacaggatgaagtcaa

SEQ ID NO: 4275 - DNA, 22 bp, synthetic construct
  misc_feature 1..22: note = Synthetic
  source 1..22: mol_type = other DNA
tctctgctccatgatttcatag

SEQ ID NO: 4276 - DNA, 22 bp, synthetic construct
  misc_feature 1..22: note = Synthetic
  source 1..22: mol_type = other DNA
tcatagtcggtgacactaagtt

SEQ ID NO: 4277 - DNA, 22 bp, synthetic construct
  misc_feature 1..22: note = Synthetic
  source 1..22: mol_type = other DNA
gtcggtgacactaagttgaggt

SEQ ID NO: 4278 - DNA, 22 bp, synthetic construct
  misc_feature 1..22: note = Synthetic
  source 1..22: mol_type = other DNA
actaagttgaggtatggagagt

SEQ ID NO: 4279 - DNA, 22 bp, synthetic construct
  misc_feature 1..22: note = Synthetic
  source 1..22: mol_type = other DNA
tggagagtttggtttctgactg

SEQ ID NO: 4280 - DNA, 22 bp, synthetic construct
  misc_feature 1..22: note = Synthetic
  source 1..22: mol_type = other DNA
tgactgctggacccatgtcctg

SEQ ID NO: 4281 - DNA, 22 bp, synthetic construct
  misc_feature 1..22: note = Synthetic
  source 1..22: mol_type = other DNA
gacccatgtcctgatggcactc

SEQ ID NO: 4282 - DNA, 22 bp, synthetic construct
  misc_feature 1..22: note = Synthetic
  source 1..22: mol_type = other DNA
ctcatggtctcctgatagcgca

SEQ ID NO: 4283 - DNA, 22 bp, synthetic construct
  misc_feature 1..22: note = Synthetic
  source 1..22: mol_type = other DNA
atggtctcctgatagcgcattg

SEQ ID NO: 4284 - DNA, 22 bp, synthetic construct
  misc_feature 1..22: note = Synthetic
  source 1..22: mol_type = other DNA
ggagcagagactcggggaattg

SEQ ID NO: 4285 - DNA, 22 bp, synthetic construct
  misc_feature 1..22: note = Synthetic
  source 1..22: mol_type = other DNA
tgaaatcatggagcagagactc

SEQ ID NO: 4286 - DNA, 22 bp, synthetic construct
  misc_feature 1..22: note = Synthetic
  source 1..22: mol_type = other DNA
atgaaatcatggagcagagact

SEQ ID NO: 4287 - DNA, 22 bp, synthetic construct
  misc_feature 1..22: note = Synthetic
  source 1..22: mol_type = other DNA
tatgaaatcatggagcagagac

SEQ ID NO: 4288 - DNA, 22 bp, synthetic construct
  misc_feature 1..22: note = Synthetic
  source 1..22: mol_type = other DNA
tagtgtcaccgactatgaaatc

SEQ ID NO: 4289 - DNA, 22 bp, synthetic construct
  misc_feature 1..22: note = Synthetic
  source 1..22: mol_type = other DNA
gaccatgagtgccatcaggaca

SEQ ID NO: 4290 - DNA, 22 bp, synthetic construct
  misc_feature 1..22: note = Synthetic
  source 1..22: mol_type = other DNA
agaccatgagtgccatcaggac

SEQ ID NO: 4291 - DNA, 22 bp, synthetic construct
  misc_feature 1..22: note = Synthetic
  source 1..22: mol_type = other DNA
atcaggagaccatgagtgccat

SEQ ID NO: 4292 - DNA, 22 bp, synthetic construct
  misc_feature 1..22: note = Synthetic
  source 1..22: mol_type = other DNA
cactttgccaccaatgcgctat

SEQ ID NO: 4293 - DNA, 22 bp, synthetic construct
  misc_feature 1..22: note = Synthetic
  source 1..22: mol_type = other DNA
aatcttgaattacctgaatttt

SEQ ID NO: 4294 - DNA, 22 bp, synthetic construct
  misc_feature 1..22: note = Synthetic
  source 1..22: mol_type = other DNA
gcttttgacaatgctcaaccag

SEQ ID NO: 4295 - DNA, 22 bp, synthetic construct
  misc_feature 1..22: note = Synthetic
  source 1..22: mol_type = other DNA
cttttgacaatgctcaaccagc

SEQ ID NO: 4296 - DNA, 22 bp, synthetic construct
  misc_feature 1..22: note = Synthetic
  source 1..22: mol_type = other DNA
ttgacaatgctcaaccagctgg

SEQ ID NO: 4297 - DNA, 22 bp, synthetic construct
  misc_feature 1..22: note = Synthetic
  source 1..22: mol_type = other DNA
cttcaaattctgattgatattt

SEQ ID NO: 4298 - DNA, 22 bp, synthetic construct
  misc_feature 1..22: note = Synthetic
  source 1..22: mol_type = other DNA
ttgatatttccggctaatttca

SEQ ID NO: 4299 - DNA, 22 bp, synthetic construct
  misc_feature 1..22: note = Synthetic
  source 1..22: mol_type = other DNA
tgatatttccggctaatttcag

SEQ ID NO: 4300 - DNA, 22 bp, synthetic construct
  misc_feature 1..22: note = Synthetic
  source 1..22: mol_type = other DNA
tttcttcgacatctctttcaca

SEQ ID NO: 4301 - DNA, 22 bp, synthetic construct
  misc_feature 1..22: note = Synthetic
  source 1..22: mol_type = other DNA
tcacagtggtgctgagatagta

SEQ ID NO: 4302 - DNA, 22 bp, synthetic construct
  misc_feature 1..22: note = Synthetic
  source 1..22: mol_type = other DNA
aatgaataaactccgaaaaatt

SEQ ID NO: 4303 - DNA, 22 bp, synthetic construct
  misc_feature 1..22: note = Synthetic
  source 1..22: mol_type = other DNA
ggttgagcattgtcaaaagcta

SEQ ID NO: 4304 - DNA, 22 bp, synthetic construct
  misc_feature 1..22: note = Synthetic
  source 1..22: mol_type = other DNA
ctggaagaagctctcctcccag

SEQ ID NO: 4305 - DNA, 22 bp, synthetic construct
  misc_feature 1..22: note = Synthetic
  source 1..22: mol_type = other DNA
aatttgaagaaattgagggacg

SEQ ID NO: 4306 - DNA, 22 bp, synthetic construct
  misc_feature 1..22: note = Synthetic
  source 1..22: mol_type = other DNA
caatcagaatttgaagaaattg

SEQ ID NO: 4307 - DNA, 22 bp, synthetic construct
  misc_feature 1..22: note = Synthetic
  source 1..22: mol_type = other DNA
tcaatcagaatttgaagaaatt

SEQ ID NO: 4308 - DNA, 22 bp, synthetic construct
  misc_feature 1..22: note = Synthetic
  source 1..22: mol_type = other DNA
agaaagcgccctctgaaattag

SEQ ID NO: 4309 - DNA, 22 bp, synthetic construct
  misc_feature 1..22: note = Synthetic
  source 1..22: mol_type = other DNA
agttctctgcaagagcaacaaa

SEQ ID NO: 4310 - DNA, 22 bp, synthetic construct
  misc_feature 1..22: note = Synthetic
  source 1..22: mol_type = other DNA
tttttagaatttctgaatcccc

SEQ ID NO: 4311 - DNA, 22 bp, synthetic construct
  misc_feature 1..22: note = Synthetic
  source 1..22: mol_type = other DNA
ttttagaatttctgaatcccca

SEQ ID NO: 4312 - DNA, 22 bp, synthetic construct
  misc_feature 1..22: note = Synthetic
  source 1..22: mol_type = other DNA
agaatttctgaatccccaaggg

SEQ ID NO: 4313 - DNA, 22 bp, synthetic construct
  misc_feature 1..22: note = Synthetic
  source 1..22: mol_type = other DNA
caacttcagccatccatttctt

SEQ ID NO: 4314 - DNA, 22 bp, synthetic construct
  misc_feature 1..22: note = Synthetic
  source 1..22: mol_type = other DNA
aacttcagccatccatttcttc

SEQ ID NO: 4315 - DNA, 22 bp, synthetic construct
  misc_feature 1..22: note = Synthetic
  source 1..22: mol_type = other DNA
gaaggaggaatggcctgccctt

SEQ ID NO: 4316 - DNA, 22 bp, synthetic construct
  misc_feature 1..22: note = Synthetic
  source 1..22: mol_type = other DNA
tgaaggaggaatggcctgccct

SEQ ID NO: 4317 - DNA, 22 bp, synthetic construct
  misc_feature 1..22: note = Synthetic
  source 1..22: mol_type = other DNA
ctgaaggaggaatggcctgccc

SEQ ID NO: 4318 - DNA, 22 bp, synthetic construct
  misc_feature 1..22: note = Synthetic
  source 1..22: mol_type = other DNA
ttgatgtttttctgaaggagga

SEQ ID NO: 4319 - DNA, 22 bp, synthetic construct
  misc_feature 1..22: note = Synthetic
  source 1..22: mol_type = other DNA
tgaagttgatgtttttctgaag

SEQ ID NO: 4320 - DNA, 22 bp, synthetic construct
  misc_feature 1..22: note = Synthetic
  source 1..22: mol_type = other DNA
ggctgaagttgatgtttttctg

SEQ ID NO: 4321 - DNA, 22 bp, synthetic construct
  misc_feature 1..22: note = Synthetic
  source 1..22: mol_type = other DNA
catacaaaccctgaagaaatgg

SEQ ID NO: 4322 - DNA, 22 bp, synthetic construct
  misc_feature 1..22: note = Synthetic
  source 1..22: mol_type = other DNA
atcacatacaaaccctgaagaa

SEQ ID NO: 4323 - DNA, 22 bp, synthetic construct
  misc_feature 1..22: note = Synthetic
  source 1..22: mol_type = other DNA
tgaaagagattgtctatacctg

SEQ ID NO: 4324 - DNA, 22 bp, synthetic construct
  misc_feature 1..22: note = Synthetic
  source 1..22: mol_type = other DNA
gtctcaagtctcgaagcaaact

SEQ ID NO: 4325 - DNA, 22 bp, synthetic construct
  misc_feature 1..22: note = Synthetic
  source 1..22: mol_type = other DNA
accttcattgacactgtttaga

SEQ ID NO: 4326 - DNA, 22 bp, synthetic construct
  misc_feature 1..22: note = Synthetic
  source 1..22: mol_type = other DNA
ccttcattgacactgtttagac

SEQ ID NO: 4327 - DNA, 22 bp, synthetic construct
  misc_feature 1..22: note = Synthetic
  source 1..22: mol_type = other DNA
tcagtgggatcacatgtgccaa

SEQ ID NO: 4328 - DNA, 22 bp, synthetic construct
  misc_feature 1..22: note = Synthetic
  source 1..22: mol_type = other DNA
actcaaagaacttaacactcag

SEQ ID NO: 4329 - DNA, 22 bp, synthetic construct
  misc_feature 1..22: note = Synthetic
  source 1..22: mol_type = other DNA
aactcaaagaacttaacactca

SEQ ID NO: 4330 - DNA, 22 bp, synthetic construct
  misc_feature 1..22: note = Synthetic
  source 1..22: mol_type = other DNA
gtctaaacagtgtcaatgaagg

SEQ ID NO: 4331 - DNA, 22 bp, synthetic construct
  misc_feature 1..22: note = Synthetic
  source 1..22: mol_type = other DNA
agtctaaacagtgtcaatgaag

SEQ ID NO: 4332 - DNA, 22 bp, synthetic construct
  misc_feature 1..22: note = Synthetic
  source 1..22: mol_type = other DNA
cccagtctaaacagtgtcaatg

SEQ ID NO: 4333 - DNA, 22 bp, synthetic construct
  misc_feature 1..22: note = Synthetic
  source 1..22: mol_type = other DNA
tcaactgctttctgtaattcat

SEQ ID NO: 4334 - DNA, 22 bp, synthetic construct
  misc_feature 1..22: note = Synthetic
  source 1..22: mol_type = other DNA
cgtgcatctctgatagatcttt

SEQ ID NO: 4335 - DNA, 22 bp, synthetic construct
  misc_feature 1..22: note = Synthetic
  source 1..22: mol_type = other DNA
gcatctctgatagatctttctg

SEQ ID NO: 4336 - DNA, 22 bp, synthetic construct
  misc_feature 1..22: note = Synthetic
  source 1..22: mol_type = other DNA
agttttctccaaacctcccttc

SEQ ID NO: 4337 - DNA, 22 bp, synthetic construct
  misc_feature 1..22: note = Synthetic
  source 1..22: mol_type = other DNA
acctcccttcaaggcctccttt

SEQ ID NO: 4338 - DNA, 22 bp, synthetic construct
  misc_feature 1..22: note = Synthetic
  source 1..22: mol_type = other DNA
acagaaagcagttgaagagatg

SEQ ID NO: 4339 - DNA, 22 bp, synthetic construct
  misc_feature 1..22: note = Synthetic
  source 1..22: mol_type = other DNA
aagatctatcagagatgcacga

SEQ ID NO: 4340 - DNA, 22 bp, synthetic construct
  misc_feature 1..22: note = Synthetic
  source 1..22: mol_type = other DNA
aaaggaggccttgaagggaggt

SEQ ID NO: 4341 - DNA, 22 bp, synthetic construct
  misc_feature 1..22: note = Synthetic
  source 1..22: mol_type = other DNA
gccagaaaggaggccttgaagg

SEQ ID NO: 4342 - DNA, 22 bp, synthetic construct
  misc_feature 1..22: note = Synthetic
  source 1..22: mol_type = other DNA
tatgccagaaaggaggccttga

SEQ ID NO: 4343 - DNA, 22 bp, synthetic construct
  misc_feature 1..22: note = Synthetic
  source 1..22: mol_type = other DNA
ctatgccagaaaggaggccttg

SEQ ID NO: 4344 - DNA, 22 bp, synthetic construct
  misc_feature 1..22: note = Synthetic
  source 1..22: mol_type = other DNA
gtggaaggtctatgccagaaag

SEQ ID NO: 4345 - DNA, 22 bp, synthetic construct
  misc_feature 1..22: note = Synthetic
  source 1..22: mol_type = other DNA
tttgtggaaggtctatgccaga

SEQ ID NO: 4346 - DNA, 22 bp, synthetic construct
  misc_feature 1..22: note = Synthetic
  source 1..22: mol_type = other DNA
cattcagcctagtgcagagcca

SEQ ID NO: 4347 - DNA, 22 bp, synthetic construct
  misc_feature 1..22: note = Synthetic
  source 1..22: mol_type = other DNA
cctagtgcagagccactggtag

SEQ ID NO: 4348 - DNA, 22 bp, synthetic construct
  misc_feature 1..22: note = Synthetic
  source 1..22: mol_type = other DNA
agtgcagagccactggtagttg

SEQ ID NO: 4349 - DNA, 22 bp, synthetic construct
  misc_feature 1..22: note = Synthetic
  source 1..22: mol_type = other DNA
tagagtttcaagttcctttttt

SEQ ID NO: 4350 - DNA, 22 bp, synthetic construct
  misc_feature 1..22: note = Synthetic
  source 1..22: mol_type = other DNA
ttttttaaggcctcttgtgcta

SEQ ID NO: 4351 - DNA, 22 bp, synthetic construct
  misc_feature 1..22: note = Synthetic
  source 1..22: mol_type = other DNA
tttaaggcctcttgtgctacag

SEQ ID NO: 4352 - DNA, 22 bp, synthetic construct
  misc_feature 1..22: note = Synthetic
  source 1..22: mol_type = other DNA
tgacactatttacagactcagt

SEQ ID NO: 4353 - DNA, 22 bp, synthetic construct
  misc_feature 1..22: note = Synthetic
  source 1..22: mol_type = other DNA
gtttcactttcgcttctttttg

SEQ ID NO: 4354 - DNA, 22 bp, synthetic construct
  misc_feature 1..22: note = Synthetic
  source 1..22: mol_type = other DNA
tttcactttcgcttctttttgt

SEQ ID NO: 4355 - DNA, 22 bp, synthetic construct
  misc_feature 1..22: note = Synthetic
  source 1..22: mol_type = other DNA
gctgaatgggaaatgcaagact

SEQ ID NO: 4356 - DNA, 22 bp, synthetic construct
  misc_feature 1..22: note = Synthetic
  source 1..22: mol_type = other DNA
agtggctctgcactaggctgaa

SEQ ID NO: 4357 - DNA, 22 bp, synthetic construct
  misc_feature 1..22: note = Synthetic
  source 1..22: mol_type = other DNA
cagtggctctgcactaggctga

SEQ ID NO: 4358 - DNA, 22 bp, synthetic construct
  misc_feature 1..22: note = Synthetic
  source 1..22: mol_type = other DNA
ccaactaccagtggctctgcac

SEQ ID NO: 4359 - DNA, 22 bp, synthetic construct
  misc_feature 1..22: note = Synthetic
  source 1..22: mol_type = other DNA
aaactctaaccaccaactacca

SEQ ID NO: 4360 - DNA, 22 bp, synthetic construct
  misc_feature 1..22: note = Synthetic
  source 1..22: mol_type = other DNA
tgtagcacaagaggccttaaaa

SEQ ID NO: 4361 - DNA, 22 bp, synthetic construct
  misc_feature 1..22: note = Synthetic
  source 1..22: mol_type = other DNA
tcaagctccacctgtagcacaa

SEQ ID NO: 4362 - DNA, 22 bp, synthetic construct
  misc_feature 1..22: note = Synthetic
  source 1..22: mol_type = other DNA
tatttttcagagagctaaagaa

SEQ ID NO: 4363 - DNA, 22 bp, synthetic construct
  misc_feature 1..22: note = Synthetic
  source 1..22: mol_type = other DNA
tcagagatttcctcagctccgc

SEQ ID NO: 4364 - DNA, 22 bp, synthetic construct
  misc_feature 1..22: note = Synthetic
  source 1..22: mol_type = other DNA
agctccgccaggaatgttttca

SEQ ID NO: 4365 - DNA, 22 bp, synthetic construct
  misc_feature 1..22: note = Synthetic
  source 1..22: mol_type = other DNA
tggcggagctgaggaaatctct

SEQ ID NO: 4366 - DNA, 22 bp, synthetic construct
  misc_feature 1..22: note = Synthetic
  source 1..22: mol_type = other DNA
tgaaaacattcctggcggagct

SEQ ID NO: 4367 - DNA, 22 bp, synthetic construct
  misc_feature 1..22: note = Synthetic
  source 1..22: mol_type = other DNA
aaaaccactgaaaacattcctg

SEQ ID NO: 4368 - DNA, 22 bp, synthetic construct
  misc_feature 1..22: note = Synthetic
  source 1..22: mol_type = other DNA
cttaaaaccactgaaaacattc

SEQ ID NO: 4369 - DNA, 22 bp, synthetic construct
  misc_feature 1..22: note = Synthetic
  source 1..22: mol_type = other DNA
catacttggagaaagcaaacaa

SEQ ID NO: 4370 - DNA, 22 bp, synthetic construct
  misc_feature 1..22: note = Synthetic
  source 1..22: mol_type = other DNA
ttggcatgagttattgtcatac

SEQ ID NO: 4371 - DNA, 22 bp, synthetic construct
  misc_feature 1..22: note = Synthetic
  source 1..22: mol_type = other DNA
tttcttaggaagtttgggcatg

SEQ ID NO: 4372 - DNA, 22 bp, synthetic construct
  misc_feature 1..22: note = Synthetic
  source 1..22: mol_type = other DNA
tatatttctttcttaggaagtt

SEQ ID NO: 4373 - DNA, 22 bp, synthetic construct
  misc_feature 1..22: note = Synthetic
  source 1..22: mol_type = other DNA
atatatttctttcttaggaagt

SEQ ID NO: 4374 - DNA, 22 bp, synthetic construct
  misc_feature 1..22: note = Synthetic
  source 1..22: mol_type = other DNA
catccatgactccgccatctgt

SEQ ID NO: 4375 - DNA, 22 bp, synthetic construct
  misc_feature 1..22: note = Synthetic
  source 1..22: mol_type = other DNA
atccatgactccgccatctgtt

SEQ ID NO: 4376 - DNA, 22 bp, synthetic construct
  misc_feature 1..22: note = Synthetic
  source 1..22: mol_type = other DNA
tgtgccaatatgcgaatctgat

SEQ ID NO: 4377 - DNA, 22 bp, synthetic construct
  misc_feature 1..22: note = Synthetic
  source 1..22: mol_type = other DNA
gtgccaatatgcgaatctgatt

SEQ ID NO: 4378 - DNA, 22 bp, synthetic construct
  misc_feature 1..22: note = Synthetic
  source 1..22: mol_type = other DNA
tcgttggagggaactacatgaa

SEQ ID NO: 4379 - DNA, 22 bp, synthetic construct
  misc_feature 1..22: note = Synthetic
  source 1..22: mol_type = other DNA
tgagacatttaattctcgttgg

SEQ ID NO: 4380 - DNA, 22 bp, synthetic construct
  misc_feature 1..22: note = Synthetic
  source 1..22: mol_type = other DNA
ttgagacatttaattctcgttg

SEQ ID NO: 4381 - DNA, 22 bp, synthetic construct
  misc_feature 1..22: note = Synthetic
  source 1..22: mol_type = other DNA
aacttgagacatttaattctcg

SEQ ID NO: 4382 - DNA, 22 bp, synthetic construct
  misc_feature 1..22: note = Synthetic
  source 1..22: mol_type = other DNA
agtcatggatgagctaatcaat

SEQ ID NO: 4383 - DNA, 22 bp, synthetic construct
  misc_feature 1..22: note = Synthetic
  source 1..22: mol_type = other DNA
gaccctaacagatggcggagtc

SEQ ID NO: 4384 - DNA, 22 bp, synthetic construct
  misc_feature 1..22: note = Synthetic
  source 1..22: mol_type = other DNA
ttggcacagaccctaacagatg

SEQ ID NO: 4385 - DNA, 22 bp, synthetic construct
  misc_feature 1..22: note = Synthetic
  source 1..22: mol_type = other DNA
atattggcacagaccctaacag

SEQ ID NO: 4386 - DNA, 22 bp, synthetic construct
  misc_feature 1..22: note = Synthetic
  source 1..22: mol_type = other DNA
taacccaaatcagattcgcata

SEQ ID NO: 4387 - DNA, 22 bp, synthetic construct
  misc_feature 1..22: note = Synthetic
  source 1..22: mol_type = other DNA
tgaaaatttgatgcgacattca

SEQ ID NO: 4388 - DNA, 22 bp, synthetic construct
  misc_feature 1..22: note = Synthetic
  source 1..22: mol_type = other DNA
gatgtacttgcctgggcttcct

SEQ ID NO: 4389 - DNA, 22 bp, synthetic construct
  misc_feature 1..22: note = Synthetic
  source 1..22: mol_type = other DNA
ccaactgcttgtcaatgaatgt

SEQ ID NO: 4390 - DNA, 22 bp, synthetic construct
  misc_feature 1..22: note = Synthetic
  source 1..22: mol_type = other DNA
caactgcttgtcaatgaatgtg

SEQ ID NO: 4391 - DNA, 22 bp, synthetic construct
  misc_feature 1..22: note = Synthetic
  source 1..22: mol_type = other DNA
tgtcaatgaatgtgagggactc

SEQ ID NO: 4392 - DNA, 22 bp, synthetic construct
  misc_feature 1..22: note = Synthetic
  source 1..22: mol_type = other DNA
gagggactcctggattaagtgt

SEQ ID NO: 4393 - DNA, 22 bp, synthetic construct
  misc_feature 1..22: note = Synthetic
  source 1..22: mol_type = other DNA
agtgtaaggatttttcagtctc

SEQ ID NO: 4394 - DNA, 22 bp, synthetic construct
  misc_feature 1..22: note = Synthetic
  source 1..22: mol_type = other DNA
gtgtaaggatttttcagtctcc

SEQ ID NO: 4395 - DNA, 22 bp, synthetic construct
  misc_feature 1..22: note = Synthetic
  source 1..22: mol_type = other DNA
atttttcagtctcctgggcaga

SEQ ID NO: 4396 - DNA, 22 bp, synthetic construct
  misc_feature 1..22: note = Synthetic
  source 1..22: mol_type = other DNA
agctcaaatgcctcaggaagcc

SEQ ID NO: 4397 - DNA, 22 bp, synthetic construct
  misc_feature 1..22: note = Synthetic
  source 1..22: mol_type = other DNA
ggtggacgcagctcaaatgcct

SEQ ID NO: 4398 - DNA, 22 bp, synthetic construct
  misc_feature 1..22: note = Synthetic
  source 1..22: mol_type = other DNA
ggcagcttatattgcagacaag

SEQ ID NO: 4399 - DNA, 22 bp, synthetic construct
  misc_feature 1..22: note = Synthetic
  source 1..22: mol_type = other DNA
gttggcagcttatattgcagac

SEQ ID NO: 4400 - DNA, 22 bp, synthetic construct
  misc_feature 1..22: note = Synthetic
  source 1..22: mol_type = other DNA
cctcacattcattgacaagcag

SEQ ID NO: 4401 - DNA, 22 bp, synthetic construct
  misc_feature 1..22: note = Synthetic
  source 1..22: mol_type = other DNA
tgaaaaatccttacacttaatc

SEQ ID NO: 4402 - DNA, 22 bp, synthetic construct
  misc_feature 1..22: note = Synthetic
  source 1..22: mol_type = other DNA
tgaacagagcatccagtctgcc

SEQ ID NO: 4403 - DNA, 22 bp, synthetic construct
  misc_feature 1..22: note = Synthetic
  source 1..22: mol_type = other DNA
ttccttctttttaggctgtaag

SEQ ID NO: 4404 - DNA, 22 bp, synthetic construct
  misc_feature 1..22: note = Synthetic
  source 1..22: mol_type = other DNA
ttattccttctttttaggctgt

SEQ ID NO: 4405 - DNA, 22 bp, synthetic construct
  misc_feature 1..22: note = Synthetic
  source 1..22: mol_type = other DNA
cctgtgcaacatcaatctgaga

SEQ ID NO: 4406 - DNA, 22 bp, synthetic construct
  misc_feature 1..22: note = Synthetic
  source 1..22: mol_type = other DNA
catcaatctgagacaggactct

SEQ ID NO: 4407 - DNA, 22 bp, synthetic construct
  misc_feature 1..22: note = Synthetic
  source 1..22: mol_type = other DNA
atcaatctgagacaggactctt

SEQ ID NO: 4408 - DNA, 22 bp, synthetic construct
  misc_feature 1..22: note = Synthetic
  source 1..22: mol_type = other DNA
tctcatgacttgtcaaatcaga

SEQ ID NO: 4409 - DNA, 22 bp, synthetic construct
  misc_feature 1..22: note = Synthetic
  source 1..22: mol_type = other DNA
tcaaatcagattggattttctg

SEQ ID NO: 4410 - DNA, 22 bp, synthetic construct
  misc_feature 1..22: note = Synthetic
  source 1..22: mol_type = other DNA
cctgtctcagattgatgttgca

SEQ ID NO: 4411 - DNA, 22 bp, synthetic construct
  misc_feature 1..22: note = Synthetic
  source 1..22: mol_type = other DNA
gaagaaacataatcaggggaag

SEQ ID NO: 4412 - DNA, 22 bp, synthetic construct
  misc_feature 1..22: note = Synthetic
  source 1..22: mol_type = other DNA
aatgaagaaacataatcagggg

SEQ ID NO: 4413 - DNA, 22 bp, synthetic construct
  misc_feature 1..22: note = Synthetic
  source 1..22: mol_type = other DNA
aagaaatgaagaaacataatca

SEQ ID NO: 4414 - DNA, 22 bp, synthetic construct
  misc_feature 1..22: note = Synthetic
  source 1..22: mol_type = other DNA
gaagaaatgaagaaacataatc

SEQ ID NO: 4415 - DNA, 22 bp, synthetic construct
  misc_feature 1..22: note = Synthetic
  source 1..22: mol_type = other DNA
agaagaaatgaagaaacataat

SEQ ID NO: 4416 - DNA, 22 bp, synthetic construct
  misc_feature 1..22: note = Synthetic
  source 1..22: mol_type = other DNA
tccacactctttgtttccaatg

SEQ ID NO: 4417 - DNA, 22 bp, synthetic construct
  misc_feature 1..22: note = Synthetic
  source 1..22: mol_type = other DNA
ttcttgtagacgctgctcaaaa

SEQ ID NO: 4418 - DNA, 22 bp, synthetic construct
  misc_feature 1..22: note = Synthetic
  source 1..22: mol_type = other DNA
tgtagacgctgctcaaaattgg

SEQ ID NO: 4419 - DNA, 22 bp, synthetic construct
  misc_feature 1..22: note = Synthetic
  source 1..22: mol_type = other DNA
gctgctcaaaattggctggttt

SEQ ID NO: 4420 - DNA, 22 bp, synthetic construct
  misc_feature 1..22: note = Synthetic
  source 1..22: mol_type = other DNA
tttctggaataatcgaaacttc

SEQ ID NO: 4421 - DNA, 22 bp, synthetic construct
  misc_feature 1..22: note = Synthetic
  source 1..22: mol_type = other DNA
acagtcacagctaaatcattgt

SEQ ID NO: 4422 - DNA, 22 bp, synthetic construct
  misc_feature 1..22: note = Synthetic
  source 1..22: mol_type = other DNA
attggaaacaaagagtgtggaa

SEQ ID NO: 4423 - DNA, 22 bp, synthetic construct
  misc_feature 1..22: note = Synthetic
  source 1..22: mol_type = other DNA
gcctgcattggaaacaaagagt

SEQ ID NO: 4424 - DNA, 22 bp, synthetic construct
  misc_feature 1..22: note = Synthetic
  source 1..22: mol_type = other DNA
agtgaagatgcacttgcctgca

SEQ ID NO: 4425 - DNA, 22 bp, synthetic construct
  misc_feature 1..22: note = Synthetic
  source 1..22: mol_type = other DNA
tgttactctttcatcaagttct

SEQ ID NO: 4426 - DNA, 22 bp, synthetic construct
  misc_feature 1..22: note = Synthetic
  source 1..22: mol_type = other DNA
gttactctttcatcaagttctt

SEQ ID NO: 4427 - DNA, 22 bp, synthetic construct
  misc_feature 1..22: note = Synthetic
  source 1..22: mol_type = other DNA
gcattataatgagctgggagca

SEQ ID NO: 4428 - DNA, 22 bp, synthetic construct
  misc_feature 1..22: note = Synthetic
  source 1..22: mol_type = other DNA
ttgaaattgcattataatgagc

SEQ ID NO: 4429 - DNA, 22 bp, synthetic construct
  misc_feature 1..22: note = Synthetic
  source 1..22: mol_type = other DNA
tttgaaattgcattataatgag

SEQ ID NO: 4430 - DNA, 22 bp, synthetic construct
  misc_feature 1..22: note = Synthetic
  source 1..22: mol_type = other DNA
tcagattgtacagaaaaagcag

SEQ ID NO: 4431 - DNA, 22 bp, synthetic construct
  misc_feature 1..22: note = Synthetic
  source 1..22: mol_type = other DNA
gaagtggaaatggtgataaaga

SEQ ID NO: 4432 - DNA, 22 bp, synthetic construct
  misc_feature 1..22: note = Synthetic
  source 1..22: mol_type = other DNA
tgaagtgaagtctgaagtggaa

SEQ ID NO: 4433 - DNA, 22 bp, synthetic construct
  misc_feature 1..22: note = Synthetic
  source 1..22: mol_type = other DNA
tctgagtgaagtgaagtctgaa

SEQ ID NO: 4434 - DNA, 22 bp, synthetic construct
  misc_feature 1..22: note = Synthetic
  source 1..22: mol_type = other DNA
tgatataggttttacctttccc

SEQ ID NO: 4435 - DNA, 22 bp, synthetic construct
  misc_feature 1..22: note = Synthetic
  source 1..22: mol_type = other DNA
gcaacttcagaatccaaattac

SEQ ID NO: 4436 - DNA, 22 bp, synthetic construct
  misc_feature 1..22: note = Synthetic
  source 1..22: mol_type = other DNA
cattcatttcctttcgcatctt

SEQ ID NO: 4437 - DNA, 22 bp, synthetic construct
  misc_feature 1..22: note = Synthetic
  source 1..22: mol_type = other DNA
attcatttcctttcgcatctta

SEQ ID NO: 4438 - DNA, 22 bp, synthetic construct
  misc_feature 1..22: note = Synthetic
  source 1..22: mol_type = other DNA
ggattctgaagttgcctgggga

SEQ ID NO: 4439 - DNA, 22 bp, synthetic construct
  misc_feature 1..22: note = Synthetic
  source 1..22: mol_type = other DNA
aatttggattctgaagttgcct

SEQ ID NO: 4440 - DNA, 22 bp, synthetic construct
  misc_feature 1..22: note = Synthetic
  source 1..22: mol_type = other DNA
taatttggattctgaagttgcc

SEQ ID NO: 4441 - DNA, 22 bp, synthetic construct
  misc_feature 1..22: note = Synthetic
  source 1..22: mol_type = other DNA
gtaatttggattctgaagttgc

SEQ ID NO: 4442 - DNA, 22 bp, synthetic construct
  misc_feature 1..22: note = Synthetic
  source 1..22: mol_type = other DNA
agttgaaggaatgcctagtaat

SEQ ID NO: 4443 - DNA, 22 bp, synthetic construct
  misc_feature 1..22: note = Synthetic
  source 1..22: mol_type = other DNA
ttgacaaagagatcagcagttg

SEQ ID NO: 4444 - DNA, 22 bp, synthetic construct
  misc_feature 1..22: note = Synthetic
  source 1..22: mol_type = other DNA
agaatggctggcagctacagat

SEQ ID NO: 4445 - DNA, 22 bp, synthetic construct
  misc_feature 1..22: note = Synthetic
  source 1..22: mol_type = other DNA
aatgaatgtcttgacagaatgg

SEQ ID NO: 4446 - DNA, 22 bp, synthetic construct
  misc_feature 1..22: note = Synthetic
  source 1..22: mol_type = other DNA
aggaaatgaatgtcttgacaga

SEQ ID NO: 4447 - DNA, 22 bp, synthetic construct
  misc_feature 1..22: note = Synthetic
  source 1..22: mol_type = other DNA
gaaattgtcccgtaagatgcga

SEQ ID NO: 4448 - DNA, 22 bp, synthetic construct
  misc_feature 1..22: note = Synthetic
  source 1..22: mol_type = other DNA
ggtaacagaaagaaagcaacag

SEQ ID NO: 4449 - DNA, 22 bp, synthetic construct
  misc_feature 1..22: note = Synthetic
  source 1..22: mol_type = other DNA
aaagatttaaccactcttctgc

SEQ ID NO: 4450 - DNA, 22 bp, synthetic construct
  misc_feature 1..22: note = Synthetic
  source 1..22: mol_type = other DNA
aagatttaaccactcttctgct

SEQ ID NO: 4451 - DNA, 22 bp, synthetic construct
  misc_feature 1..22: note = Synthetic
  source 1..22: mol_type = other DNA
atttaaccactcttctgctcgg

SEQ ID NO: 4452 - DNA, 22 bp, synthetic construct
  misc_feature 1..22: note = Synthetic
  source 1..22: mol_type = other DNA
cttcttgcccaaaactgttttc

SEQ ID NO: 4453 - DNA, 22 bp, synthetic construct
  misc_feature 1..22: note = Synthetic
  source 1..22: mol_type = other DNA
ctcctacctctgtgatactctt

SEQ ID NO: 4454 - DNA, 22 bp, synthetic construct
  misc_feature 1..22: note = Synthetic
  source 1..22: mol_type = other DNA
agaagagtggttaaatcttttg

SEQ ID NO: 4455 - DNA, 22 bp, synthetic construct
  misc_feature 1..22: note = Synthetic
  source 1..22: mol_type = other DNA
ctgtcacctcccgagcagaaga

SEQ ID NO: 4456 - DNA, 22 bp, synthetic construct
  misc_feature 1..22: note = Synthetic
  source 1..22: mol_type = other DNA
aactcagtcttctgaatagtaa

SEQ ID NO: 4457 - DNA, 22 bp, synthetic construct
  misc_feature 1..22: note = Synthetic
  source 1..22: mol_type = other DNA
tttgggcaagaaggagacgttg

SEQ ID NO: 4458 - DNA, 22 bp, synthetic construct
  misc_feature 1..22: note = Synthetic
  source 1..22: mol_type = other DNA
agttttgggcaagaaggagacg

SEQ ID NO: 4459 - DNA, 22 bp, synthetic construct
  misc_feature 1..22: note = Synthetic
  source 1..22: mol_type = other DNA
cttgaaaacagttttgggcaag

SEQ ID NO: 4460 - DNA, 22 bp, synthetic construct
  misc_feature 1..22: note = Synthetic
  source 1..22: mol_type = other DNA
ggagaggccttgaaaacagttt

SEQ ID NO: 4461 - DNA, 22 bp, synthetic construct
  misc_feature 1..22: note = Synthetic
  source 1..22: mol_type = other DNA
aggagaggccttgaaaacagtt

SEQ ID NO: 4462 - DNA, 22 bp, synthetic construct
  misc_feature 1..22: note = Synthetic
  source 1..22: mol_type = other DNA
gaagagtatcacagaggtagga

SEQ ID NO: 4463 - DNA, 22 bp, synthetic construct
  misc_feature 1..22: note = Synthetic
  source 1..22: mol_type = other DNA
cacctgaagagtatcacagagg

SEQ ID NO: 4464 - DNA, 22 bp, synthetic construct
  misc_feature 1..22: note = Synthetic
  source 1..22: mol_type = other DNA
ggtgcacctgaagagtatcaca

SEQ ID NO: 4465 - DNA, 22 bp, synthetic construct
  misc_feature 1..22: note = Synthetic
  source 1..22: mol_type = other DNA
tcaaaaagagattgagaaacag

SEQ ID NO: 4466 - DNA, 22 bp, synthetic construct
  misc_feature 1..22: note = Synthetic
  source 1..22: mol_type = other DNA
ccttaagcacgtcttctttttg

SEQ ID NO: 4467 - DNA, 22 bp, synthetic construct
  misc_feature 1..22: note = Synthetic
  source 1..22: mol_type = other DNA
cttaagcacgtcttctttttgc

SEQ ID NO: 4468 - DNA, 22 bp, synthetic construct
  misc_feature 1..22: note = Synthetic
  source 1..22: mol_type = other DNA
ttaagcacgtcttctttttgct

SEQ ID NO: 4469 - DNA, 22 bp, synthetic construct
  misc_feature 1..22: note = Synthetic
  source 1..22: mol_type = other DNA
cctgaatgatccactttgtgat

SEQ ID NO: 4470 - DNA, 22 bp, synthetic construct
  misc_feature 1..22: note = Synthetic
  source 1..22: mol_type = other DNA
actttgtgatgtggtccacatt

SEQ ID NO: 4471 - DNA, 22 bp, synthetic construct
  misc_feature 1..22: note = Synthetic
  source 1..22: mol_type = other DNA
ggtcaaaagtttccatgtgttt

SEQ ID NO: 4472 - DNA, 22 bp, synthetic construct
  misc_feature 1..22: note = Synthetic
  source 1..22: mol_type = other DNA
ccagcaaaaagaagacgtgctt

SEQ ID NO: 4473 - DNA, 22 bp, synthetic construct
  misc_feature 1..22: note = Synthetic
  source 1..22: mol_type = other DNA
gatcattcaggctgacacactt

SEQ ID NO: 4474 - DNA, 22 bp, synthetic construct
  misc_feature 1..22: note = Synthetic
  source 1..22: mol_type = other DNA
ccacatcacaaagtggatcatt

SEQ ID NO: 4475 - DNA, 22 bp, synthetic construct
  misc_feature 1..22: note = Synthetic
  source 1..22: mol_type = other DNA
agaatgtggaccacatcacaaa

SEQ ID NO: 4476 - DNA, 22 bp, synthetic construct
  misc_feature 1..22: note = Synthetic
  source 1..22: mol_type = other DNA
catggaaacttttgaccagaat

SEQ ID NO: 4477 - DNA, 22 bp, synthetic construct
  misc_feature 1..22: note = Synthetic
  source 1..22: mol_type = other DNA
aattaaggaataccagaaacac

SEQ ID NO: 4478 - DNA, 22 bp, synthetic construct
  misc_feature 1..22: note = Synthetic
  source 1..22: mol_type = other DNA
tccagtcttaattctgtgtgaa

SEQ ID NO: 4479 - DNA, 22 bp, synthetic construct
  misc_feature 1..22: note = Synthetic
  source 1..22: mol_type = other DNA
tgtgtgaaatggctgcaaatcg

SEQ ID NO: 4480 - DNA, 22 bp, synthetic construct
  misc_feature 1..22: note = Synthetic
  source 1..22: mol_type = other DNA
atcgatggttgagctctgagat

SEQ ID NO: 4481 - DNA, 22 bp, synthetic construct
  misc_feature 1..22: note = Synthetic
  source 1..22: mol_type = other DNA
tcgatggttgagctctgagatt

SEQ ID NO: 4482 - DNA, 22 bp, synthetic construct
  misc_feature 1..22: note = Synthetic
  source 1..22: mol_type = other DNA
cgatggttgagctctgagattt

SEQ ID NO: 4483 - DNA, 22 bp, synthetic construct
  misc_feature 1..22: note = Synthetic
  source 1..22: mol_type = other DNA
ggggctctactaatttcctgca

SEQ ID NO: 4484 - DNA, 22 bp, synthetic construct
  misc_feature 1..22: note = Synthetic
  source 1..22: mol_type = other DNA
ctaatttcctgcagtggtcacc

SEQ ID NO: 4485 - DNA, 22 bp, synthetic construct
  misc_feature 1..22: note = Synthetic
  source 1..22: mol_type = other DNA
ggtttgccatcaagtttgctgc

SEQ ID NO: 4486 - DNA, 22 bp, synthetic construct
  misc_feature 1..22: note = Synthetic
  source 1..22: mol_type = other DNA
tggtcacgtgtagagtccacct

SEQ ID NO: 4487 - DNA, 22 bp, synthetic construct
  misc_feature 1..22: note = Synthetic
  source 1..22: mol_type = other DNA
ggtcacgtgtagagtccacctt

SEQ ID NO: 4488 - DNA, 22 bp, synthetic construct
  misc_feature 1..22: note = Synthetic
  source 1..22: mol_type = other DNA
cacagaattaagactggaaagg

SEQ ID NO: 4489 - DNA, 22 bp, synthetic construct
  misc_feature 1..22: note = Synthetic
  source 1..22: mol_type = other DNA
ttcacacagaattaagactgga

SEQ ID NO: 4490 - DNA, 22 bp, synthetic construct
  misc_feature 1..22: note = Synthetic
  source 1..22: mol_type = other DNA
gccatttcacacagaattaaga

SEQ ID NO: 4491 - DNA, 22 bp, synthetic construct
  misc_feature 1..22: note = Synthetic
  source 1..22: mol_type = other DNA
tggcaaaccgcggtgaccactg

SEQ ID NO: 4492 - DNA, 22 bp, synthetic construct
  misc_feature 1..22: note = Synthetic
  source 1..22: mol_type = other DNA
gcagcaaacttgatggcaaacc

SEQ ID NO: 4493 - DNA, 22 bp, synthetic construct
  misc_feature 1..22: note = Synthetic
  source 1..22: mol_type = other DNA
acgtgaccaagcagcaaacttg

SEQ ID NO: 4494 - DNA, 22 bp, synthetic construct
  misc_feature 1..22: note = Synthetic
  source 1..22: mol_type = other DNA
actgaatgacatacgcccaaag

SEQ ID NO: 4495 - DNA, 22 bp, synthetic construct
  misc_feature 1..22: note = Synthetic
  source 1..22: mol_type = other DNA
agaactgaatgacatacgccca

SEQ ID NO: 4496 - DNA, 22 bp, synthetic construct
  misc_feature 1..22: note = Synthetic
  source 1..22: mol_type = other DNA
tgctcatggaatatagcgttta

SEQ ID NO: 4497 - DNA, 22 bp, synthetic construct
  misc_feature 1..22: note = Synthetic
  source 1..22: mol_type = other DNA
ccctgctgaatttcagcctcca

SEQ ID NO: 4498 - DNA, 22 bp, synthetic construct
  misc_feature 1..22: note = Synthetic
  source 1..22: mol_type = other DNA
ttaaactgctccaattccttca

SEQ ID NO: 4499 - DNA, 22 bp, synthetic construct
  misc_feature 1..22: note = Synthetic
  source 1..22: mol_type = other DNA
ctgctccaattccttcaaagga

SEQ ID NO: 4500 - DNA, 22 bp, synthetic construct
  misc_feature 1..22: note = Synthetic
  source 1..22: mol_type = other DNA
ctccaattccttcaaaggaatg

SEQ ID NO: 4501 - DNA, 22 bp, synthetic construct
  misc_feature 1..22: note = Synthetic
  source 1..22: mol_type = other DNA
agaggaagacttcaataaagat

SEQ ID NO: 4502 - DNA, 22 bp, synthetic construct
  misc_feature 1..22: note = Synthetic
  source 1..22: mol_type = other DNA
tcagcagggggtgaatctgaaa

SEQ ID NO: 4503 - DNA, 22 bp, synthetic construct
  misc_feature 1..22: note = Synthetic
  source 1..22: mol_type = other DNA
actggaggctgaaattcagcag

SEQ ID NO: 4504 - DNA, 22 bp, synthetic construct
  misc_feature 1..22: note = Synthetic
  source 1..22: mol_type = other DNA
cactggaggctgaaattcagca

SEQ ID NO: 4505 - DNA, 22 bp, synthetic construct
  misc_feature 1..22: note = Synthetic
  source 1..22: mol_type = other DNA
ccactggaggctgaaattcagc

SEQ ID NO: 4506 - DNA, 22 bp, synthetic construct
  misc_feature 1..22: note = Synthetic
  source 1..22: mol_type = other DNA
accactggaggctgaaattcag

SEQ ID NO: 4507 - DNA, 22 bp, synthetic construct
  misc_feature 1..22: note = Synthetic
  source 1..22: mol_type = other DNA
acaaaaattgcttgaaccactg

SEQ ID NO: 4508 - DNA, 22 bp, synthetic construct
  misc_feature 1..22: note = Synthetic
  source 1..22: mol_type = other DNA
tatacaaaaattgcttgaacca

SEQ ID NO: 4509 - DNA, 22 bp, synthetic construct
  misc_feature 1..22: note = Synthetic
  source 1..22: mol_type = other DNA
ggcctccattcctttgaaggaa

SEQ ID NO: 4510 - DNA, 22 bp, synthetic construct
  misc_feature 1..22: note = Synthetic
  source 1..22: mol_type = other DNA
tttttaggcctccattcctttg

SEQ ID NO: 4511 - DNA, 22 bp, synthetic construct
  misc_feature 1..22: note = Synthetic
  source 1..22: mol_type = other DNA
acagacaaaacataatgctctc

SEQ ID NO: 4512 - DNA, 22 bp, synthetic construct
  misc_feature 1..22: note = Synthetic
  source 1..22: mol_type = other DNA
aatcacagatgagagaaagcga

SEQ ID NO: 4513 - DNA, 22 bp, synthetic construct
  misc_feature 1..22: note = Synthetic
  source 1..22: mol_type = other DNA
actgtaaaagaattgttgcaaa

SEQ ID NO: 4514 - DNA, 22 bp, synthetic construct
  misc_feature 1..22: note = Synthetic
  source 1..22: mol_type = other DNA
tttgatcagaatgaagacaatg

SEQ ID NO: 4515 - DNA, 22 bp, synthetic construct
  misc_feature 1..22: note = Synthetic
  source 1..22: mol_type = other DNA
ttttgatcagaatgaagacaat

SEQ ID NO: 4516 - DNA, 22 bp, synthetic construct
  misc_feature 1..22: note = Synthetic
  source 1..22: mol_type = other DNA
tacctttattttcctttcatct

SEQ ID NO: 4517 - DNA, 22 bp, synthetic construct
  misc_feature 1..22: note = Synthetic
  source 1..22: mol_type = other DNA
acctttattttcctttcatctc

SEQ ID NO: 4518 - DNA, 22 bp, synthetic construct
  misc_feature 1..22: note = Synthetic
  source 1..22: mol_type = other DNA
attttcctttcatctctgggct

SEQ ID NO: 4519 - DNA, 22 bp, synthetic construct
  misc_feature 1..22: note = Synthetic
  source 1..22: mol_type = other DNA
tcctttcatctctgggctcagg

SEQ ID NO: 4520 - DNA, 22 bp, synthetic construct
  misc_feature 1..22: note = Synthetic
  source 1..22: mol_type = other DNA
ttcatctctgggctcaggtagg

SEQ ID NO: 4521 - DNA, 22 bp, synthetic construct
  misc_feature 1..22: note = Synthetic
  source 1..22: mol_type = other DNA
tttcaatgtcatccaagcattt

SEQ ID NO: 4522 - DNA, 22 bp, synthetic construct
  misc_feature 1..22: note = Synthetic
  source 1..22: mol_type = other DNA
gcccagagatgaaaggaaaata

SEQ ID NO: 4523 - DNA, 22 bp, synthetic construct
  misc_feature 1..22: note = Synthetic
  source 1..22: mol_type = other DNA
gcctacctgagcccagagatga

SEQ ID NO: 4524 - DNA, 22 bp, synthetic construct
  misc_feature 1..22: note = Synthetic
  source 1..22: mol_type = other DNA
ggctgatgatctcctgaaatgc

SEQ ID NO: 4525 - DNA, 22 bp, synthetic construct
  misc_feature 1..22: note = Synthetic
  source 1..22: mol_type = other DNA
tcagtggtatcagtacaagagg

SEQ ID NO: 4526 - DNA, 22 bp, synthetic construct
  misc_feature 1..22: note = Synthetic
  source 1..22: mol_type = other DNA
ctcatcagtggtatcagtacaa

SEQ ID NO: 4527 - DNA, 22 bp, synthetic construct
  misc_feature 1..22: note = Synthetic
  source 1..22: mol_type = other DNA
aggctctagaaatttctcatca

SEQ ID NO: 4528 - DNA, 22 bp, synthetic construct
  misc_feature 1..22: note = Synthetic
  source 1..22: mol_type = other DNA
tttgaggtctcaaagaagaaaa

SEQ ID NO: 4529 - DNA, 22 bp, synthetic construct
  misc_feature 1..22: note = Synthetic
  source 1..22: mol_type = other DNA
gtctgcaccatgaacaggattt

SEQ ID NO: 4530 - DNA, 22 bp, synthetic construct
  misc_feature 1..22: note = Synthetic
  source 1..22: mol_type = other DNA
tttcccgccagcgcttgctgag

SEQ ID NO: 4531 - DNA, 22 bp, synthetic construct
  misc_feature 1..22: note = Synthetic
  source 1..22: mol_type = other DNA
cgcttgctgagctggatctgag

SEQ ID NO: 4532 - DNA, 22 bp, synthetic construct
  misc_feature 1..22: note = Synthetic
  source 1..22: mol_type = other DNA
ctgagttggctccactgccatt

SEQ ID NO: 4533 - DNA, 22 bp, synthetic construct
  misc_feature 1..22: note = Synthetic
  source 1..22: mol_type = other DNA
gatccagctcagcaagcgctgg

SEQ ID NO: 4534 - DNA, 22 bp, synthetic construct
  misc_feature 1..22: note = Synthetic
  source 1..22: mol_type = other DNA
agatccagctcagcaagcgctg

SEQ ID NO: 4535 - DNA, 22 bp, synthetic construct
  misc_feature 1..22: note = Synthetic
  source 1..22: mol_type = other DNA
ctcagatccagctcagcaagcg

SEQ ID NO: 4536 - DNA, 22 bp, synthetic construct
  misc_feature 1..22: note = Synthetic
  source 1..22: mol_type = other DNA
tgaggatggggccgcaatggca

SEQ ID NO: 4537 - DNA, 22 bp, synthetic construct
  misc_feature 1..22: note = Synthetic
  source 1..22: mol_type = other DNA
cttgtctgaggatggggccgca

SEQ ID NO: 4538 - DNA, 22 bp, synthetic construct
  misc_feature 1..22: note = Synthetic
  source 1..22: mol_type = other DNA
agctgagggcttgtctgaggat

SEQ ID NO: 4539 - DNA, 22 bp, synthetic construct
  misc_feature 1..22: note = Synthetic
  source 1..22: mol_type = other DNA
aagctgagggcttgtctgagga

SEQ ID NO: 4540 - DNA, 22 bp, synthetic construct
  misc_feature 1..22: note = Synthetic
  source 1..22: mol_type = other DNA
caagctgagggcttgtctgagg

SEQ ID NO: 4541 - DNA, 22 bp, synthetic construct
  misc_feature 1..22: note = Synthetic
  source 1..22: mol_type = other DNA
taggcaagctgagggcttgtct

SEQ ID NO: 4542 - DNA, 22 bp, synthetic construct
  misc_feature 1..22: note = Synthetic
  source 1..22: mol_type = other DNA
aatgcagtgcgtaggcaagctg

SEQ ID NO: 4543 - DNA, 22 bp, synthetic construct
  misc_feature 1..22: note = Synthetic
  source 1..22: mol_type = other DNA
gaatgcagtgcgtaggcaagct

SEQ ID NO: 4544 - DNA, 22 bp, synthetic construct
  misc_feature 1..22: note = Synthetic
  source 1..22: mol_type = other DNA
aagaggagctgaatgcagtgcg

SEQ ID NO: 4545 - DNA, 22 bp, synthetic construct
  misc_feature 1..22: note = Synthetic
  source 1..22: mol_type = other DNA
tcgggaattgcagaagaagaaa

SEQ ID NO: 4546 - DNA, 22 bp, synthetic construct
  misc_feature 1..22: note = Synthetic
  source 1..22: mol_type = other DNA
ttttgctcaataggaaattgat

SEQ ID NO: 4547 - DNA, 22 bp, synthetic construct
  misc_feature 1..22: note = Synthetic
  source 1..22: mol_type = other DNA
gttttgctcaataggaaattga

SEQ ID NO: 4548 - DNA, 22 bp, synthetic construct
  misc_feature 1..22: note = Synthetic
  source 1..22: mol_type = other DNA
gatcttcaaagtccttagcaca

SEQ ID NO: 4549 - DNA, 22 bp, synthetic construct
  misc_feature 1..22: note = Synthetic
  source 1..22: mol_type = other DNA
tcaaagtccttagcacagaggt

SEQ ID NO: 4550 - DNA, 22 bp, synthetic construct
  misc_feature 1..22: note = Synthetic
  source 1..22: mol_type = other DNA
tgagaagttgttccacttctaa

SEQ ID NO: 4551 - DNA, 22 bp, synthetic construct
  misc_feature 1..22: note = Synthetic
  source 1..22: mol_type = other DNA
gagaagttgttccacttctaat

SEQ ID NO: 4552 - DNA, 22 bp, synthetic construct
  misc_feature 1..22: note = Synthetic
  source 1..22: mol_type = other DNA
gtgatttcagtcaaataagtag

SEQ ID NO: 4553 - DNA, 22 bp, synthetic construct
  misc_feature 1..22: note = Synthetic
  source 1..22: mol_type = other DNA
gaaggcacataagaaatttcca

SEQ ID NO: 4554 - DNA, 22 bp, synthetic construct
  misc_feature 1..22: note = Synthetic
  source 1..22: mol_type = other DNA
tcatcaccatcatcgtttcttc

SEQ ID NO: 4555 - DNA, 22 bp, synthetic construct
  misc_feature 1..22: note = Synthetic
  source 1..22: mol_type = other DNA
tcgtttcttcacggacagtgtg

SEQ ID NO: 4556 - DNA, 22 bp, synthetic construct
  misc_feature 1..22: note = Synthetic
  source 1..22: mol_type = other DNA
ctttaagcaagaggagtctctg

SEQ ID NO: 4557 - DNA, 22 bp, synthetic construct
  misc_feature 1..22: note = Synthetic
  source 1..22: mol_type = other DNA
ctttgaagatctctttaagcaa

SEQ ID NO: 4558 - DNA, 22 bp, synthetic construct
  misc_feature 1..22: note = Synthetic
  source 1..22: mol_type = other DNA
caatgctcctgacctctgtgct

SEQ ID NO: 4559 - DNA, 22 bp, synthetic construct
  misc_feature 1..22: note = Synthetic
  source 1..22: mol_type = other DNA
tgtctcacaagccctattagaa

SEQ ID NO: 4560 - DNA, 22 bp, synthetic construct
  misc_feature 1..22: note = Synthetic
  source 1..22: mol_type = other DNA
ggtgatgactgaagacatgcct

SEQ ID NO: 4561 - DNA, 22 bp, synthetic construct
  misc_feature 1..22: note = Synthetic
  source 1..22: mol_type = other DNA
cactgtccgtgaagaaacgatg

SEQ ID NO: 4562 - DNA, 22 bp, synthetic construct
  misc_feature 1..22: note = Synthetic
  source 1..22: mol_type = other DNA
atatatgtgttacctacccttg

SEQ ID NO: 4563 - DNA, 22 bp, synthetic construct
  misc_feature 1..22: note = Synthetic
  source 1..22: mol_type = other DNA
acattttgttaactttttccca

SEQ ID NO: 4564 - DNA, 22 bp, synthetic construct
  misc_feature 1..22: note = Synthetic
  source 1..22: mol_type = other DNA
ctttttcccattggaaatcaag

SEQ ID NO: 4565 - DNA, 22 bp, synthetic construct
  misc_feature 1..22: note = Synthetic
  source 1..22: mol_type = other DNA
tttttcccattggaaatcaagc

SEQ ID NO: 4566 - DNA, 22 bp, synthetic construct
  misc_feature 1..22: note = Synthetic
  source 1..22: mol_type = other DNA
tcctgtagcttcaccctttcca

SEQ ID NO: 4567 - DNA, 22 bp, synthetic construct
  misc_feature 1..22: note = Synthetic
  source 1..22: mol_type = other DNA
aatgtacaaggaccgacaaggg

SEQ ID NO: 4568 - DNA, 22 bp, synthetic construct
  misc_feature 1..22: note = Synthetic
  source 1..22: mol_type = other DNA
acaaaatgtacaaggaccgaca

SEQ ID NO: 4569 - DNA, 22 bp, synthetic construct
  misc_feature 1..22: note = Synthetic
  source 1..22: mol_type = other DNA
aacaaaatgtacaaggaccgac

SEQ ID NO: 4570 - DNA, 22 bp, synthetic construct
  misc_feature 1..22: note = Synthetic
  source 1..22: mol_type = other DNA
ggaaaaagttaacaaaatgtac

SEQ ID NO: 4571 - DNA, 22 bp, synthetic construct
  misc_feature 1..22: note = Synthetic
  source 1..22: mol_type = other DNA
tctctcccagcttgatttccaa

SEQ ID NO: 4572 - DNA, 22 bp, synthetic construct
  misc_feature 1..22: note = Synthetic
  source 1..22: mol_type = other DNA
ctctctcccagcttgatttcca

SEQ ID NO: 4573 - DNA, 22 bp, synthetic construct
  misc_feature 1..22: note = Synthetic
  source 1..22: mol_type = other DNA
gcctgtggaaagggtgaagcta

SEQ ID NO: 4574 - DNA, 22 bp, synthetic construct
  misc_feature 1..22: note = Synthetic
  source 1..22: mol_type = other DNA
gcaaagtgcaacgcctgtggaa

SEQ ID NO: 4575 - DNA, 22 bp, synthetic construct
  misc_feature 1..22: note = Synthetic
  source 1..22: mol_type = other DNA
tgcaaagtgcaacgcctgtgga

SEQ ID NO: 4576 - DNA, 22 bp, synthetic construct
  misc_feature 1..22: note = Synthetic
  source 1..22: mol_type = other DNA
agcattgcaaagtgcaacgcct

SEQ ID NO: 4577 - DNA, 22 bp, synthetic construct
  misc_feature 1..22: note = Synthetic
  source 1..22: mol_type = other DNA
atagtctacaacaaagctcagg

SEQ ID NO: 4578 - DNA, 22 bp, synthetic construct
  misc_feature 1..22: note = Synthetic
  source 1..22: mol_type = other DNA
aaagatagtctacaacaaagct

SEQ ID NO: 4579 - DNA, 22 bp, synthetic construct
  misc_feature 1..22: note = Synthetic
  source 1..22: mol_type = other DNA
tcttttagttgctgctcttttc

SEQ ID NO: 4580 - DNA, 22 bp, synthetic construct
  misc_feature 1..22: note = Synthetic
  source 1..22: mol_type = other DNA
tgctgctcttttccaggttcaa

SEQ ID NO: 4581 - DNA, 22 bp, synthetic construct
  misc_feature 1..22: note = Synthetic
  source 1..22: mol_type = other DNA
gctgctcttttccaggttcaag

SEQ ID NO: 4582 - DNA, 22 bp, synthetic construct
  misc_feature 1..22: note = Synthetic
  source 1..22: mol_type = other DNA
gatattcttttgttcttctagc

SEQ ID NO: 4583 - DNA, 22 bp, synthetic construct
  misc_feature 1..22: note = Synthetic
  source 1..22: mol_type = other DNA
aaaagaaaagcttgagcaagtc

SEQ ID NO: 4584 - DNA, 22 bp, synthetic construct
  misc_feature 1..22: note = Synthetic
  source 1..22: mol_type = other DNA
attgctagtatcccacttgaac

SEQ ID NO: 4585 - DNA, 22 bp, synthetic construct
  misc_feature 1..22: note = Synthetic
  source 1..22: mol_type = other DNA
aaatgaatttgttttatggttg

SEQ ID NO: 4586 - DNA, 22 bp, synthetic construct
  misc_feature 1..22: note = Synthetic
  source 1..22: mol_type = other DNA
tttaaatgaatttgttttatgg

SEQ ID NO: 4587 - DNA, 22 bp, synthetic construct
  misc_feature 1..22: note = Synthetic
  source 1..22: mol_type = other DNA
gagatttaaatgaatttgtttt

SEQ ID NO: 4588 - DNA, 22 bp, synthetic construct
  misc_feature 1..22: note = Synthetic
  source 1..22: mol_type = other DNA
gttaatgtctaacctttatcca

SEQ ID NO: 4589 - DNA, 22 bp, synthetic construct
  misc_feature 1..22: note = Synthetic
  source 1..22: mol_type = other DNA
ttttcaagtttatcttgctctt

SEQ ID NO: 4590 - DNA, 22 bp, synthetic construct
  misc_feature 1..22: note = Synthetic
  source 1..22: mol_type = other DNA
tttcaagtttatcttgctcttc

SEQ ID NO: 4591 - DNA, 22 bp, synthetic construct
  misc_feature 1..22: note = Synthetic
  source 1..22: mol_type = other DNA
tttatcttgctcttctgggctt

SEQ ID NO: 4592 - DNA, 22 bp, synthetic construct
  misc_feature 1..22: note = Synthetic
  source 1..22: mol_type = other DNA
ttatcttgctcttctgggctta

SEQ ID NO: 4593 - DNA, 22 bp, synthetic construct
  misc_feature 1..22: note = Synthetic
  source 1..22: mol_type = other DNA
gcttatgggagcacttacaagc

SEQ ID NO: 4594 - DNA, 22 bp, synthetic construct
  misc_feature 1..22: note = Synthetic
  source 1..22: mol_type = other DNA
cttatgggagcacttacaagca

SEQ ID NO: 4595 - DNA, 22 bp, synthetic construct
  misc_feature 1..22: note = Synthetic
  source 1..22: mol_type = other DNA
catttaattgtttgagaattcc

SEQ ID NO: 4596 - DNA, 22 bp, synthetic construct
  misc_feature 1..22: note = Synthetic
  source 1..22: mol_type = other DNA
attgtttgagaattccctggcg

SEQ ID NO: 4597 - DNA, 22 bp, synthetic construct
  misc_feature 1..22: note = Synthetic
  source 1..22: mol_type = other DNA
ttgtttgagaattccctggcgc

SEQ ID NO: 4598 - DNA, 22 bp, synthetic construct
  misc_feature 1..22: note = Synthetic
  source 1..22: mol_type = other DNA
tgtttgagaattccctggcgca

SEQ ID NO: 4599 - DNA, 22 bp, synthetic construct
  misc_feature 1..22: note = Synthetic
  source 1..22: mol_type = other DNA
gcagacaaatctccagtggata

SEQ ID NO: 4600 - DNA, 22 bp, synthetic construct
  misc_feature 1..22: note = Synthetic
  source 1..22: mol_type = other DNA
agctcaagcagacaaatctcca

SEQ ID NO: 4601 - DNA, 22 bp, synthetic construct
  misc_feature 1..22: note = Synthetic
  source 1..22: mol_type = other DNA
ctcaaacaattaaatgaaactg

SEQ ID NO: 4602 - DNA, 22 bp, synthetic construct
  misc_feature 1..22: note = Synthetic
  source 1..22: mol_type = other DNA
attctcaaacaattaaatgaaa

SEQ ID NO: 4603 - DNA, 22 bp, synthetic construct
  misc_feature 1..22: note = Synthetic
  source 1..22: mol_type = other DNA
gtggaagagttgcccctgcgcc

SEQ ID NO: 4604 - DNA, 22 bp, synthetic construct
  misc_feature 1..22: note = Synthetic
  source 1..22: mol_type = other DNA
ggtggaagagttgcccctgcgc

SEQ ID NO: 4605 - DNA, 22 bp, synthetic construct
  misc_feature 1..22: note = Synthetic
  source 1..22: mol_type = other DNA
catttgtctgtttcagttactg

SEQ ID NO: 4606 - DNA, 22 bp, synthetic construct
  misc_feature 1..22: note = Synthetic
  source 1..22: mol_type = other DNA
ttgcatttgtctgtttcagtta

SEQ ID NO: 4607 - DNA, 22 bp, synthetic construct
  misc_feature 1..22: note = Synthetic
  source 1..22: mol_type = other DNA
aagttccctaccttaacgtcaa

SEQ ID NO: 4608 - DNA, 22 bp, synthetic construct
  misc_feature 1..22: note = Synthetic
  source 1..22: mol_type = other DNA
ccttaacgtcaaatggtccttc

SEQ ID NO: 4609 - DNA, 22 bp, synthetic construct
  misc_feature 1..22: note = Synthetic
  source 1..22: mol_type = other DNA
acgtcaaatggtccttcttggt

SEQ ID NO: 4610 - DNA, 22 bp, synthetic construct
  misc_feature 1..22: note = Synthetic
  source 1..22: mol_type = other DNA
caaatggtccttcttggtttgg

SEQ ID NO: 4611 - DNA, 22 bp, synthetic construct
  misc_feature 1..22: note = Synthetic
  source 1..22: mol_type = other DNA
taaatttccaactgattcctaa

SEQ ID NO: 4612 - DNA, 22 bp, synthetic construct
  misc_feature 1..22: note = Synthetic
  source 1..22: mol_type = other DNA
gcagatgatttaactgctcttc

SEQ ID NO: 4613 - DNA, 22 bp, synthetic construct
  misc_feature 1..22: note = Synthetic
  source 1..22: mol_type = other DNA
caagctttttttcaagctgccc

SEQ ID NO: 4614 - DNA, 22 bp, synthetic construct
  misc_feature 1..22: note = Synthetic
  source 1..22: mol_type = other DNA
gcttcaatttctccttgtttct

SEQ ID NO: 4615 - DNA, 22 bp, synthetic construct
  misc_feature 1..22: note = Synthetic
  source 1..22: mol_type = other DNA
tccttgtttctcaggtaaagct

SEQ ID NO: 4616 - DNA, 22 bp, synthetic construct
  misc_feature 1..22: note = Synthetic
  source 1..22: mol_type = other DNA
aaggaccatttgacgttaaggt

SEQ ID NO: 4617 - DNA, 22 bp, synthetic construct
  misc_feature 1..22: note = Synthetic
  source 1..22: mol_type = other DNA
gaaggaccatttgacgttaagg

SEQ ID NO: 4618 - DNA, 22 bp, synthetic construct
  misc_feature 1..22: note = Synthetic
  source 1..22: mol_type = other DNA
ccaagaaggaccatttgacgtt

SEQ ID NO: 4619 - DNA, 22 bp, synthetic construct
  misc_feature 1..22: note = Synthetic
  source 1..22: mol_type = other DNA
atttataaccaaccaaaccaag

SEQ ID NO: 4620 - DNA, 22 bp, synthetic construct
  misc_feature 1..22: note = Synthetic
  source 1..22: mol_type = other DNA
gttatctcctattaggaatcag

SEQ ID NO: 4621 - DNA, 22 bp, synthetic construct
  misc_feature 1..22: note = Synthetic
  source 1..22: mol_type = other DNA
tgctgctgtggttatctcctat

SEQ ID NO: 4622 - DNA, 22 bp, synthetic construct
  misc_feature 1..22: note = Synthetic
  source 1..22: mol_type = other DNA
agcagttaaatcatctgctgct

SEQ ID NO: 4623 - DNA, 22 bp, synthetic construct
  misc_feature 1..22: note = Synthetic
  source 1..22: mol_type = other DNA
ttgaagctcaaataaaagacct

SEQ ID NO: 4624 - DNA, 22 bp, synthetic construct
  misc_feature 1..22: note = Synthetic
  source 1..22: mol_type = other DNA
attgaagctcaaataaaagacc

SEQ ID NO: 4625 - DNA, 22 bp, synthetic construct
  misc_feature 1..22: note = Synthetic
  source 1..22: mol_type = other DNA
tccagagctttacctgagaaac

SEQ ID NO: 4626 - DNA, 22 bp, synthetic construct
  misc_feature 1..22: note = Synthetic
  source 1..22: mol_type = other DNA
agaggttgcttcattaccttca

SEQ ID NO: 4627 - DNA, 22 bp, synthetic construct
  misc_feature 1..22: note = Synthetic
  source 1..22: mol_type = other DNA
cttcattaccttcactggctga

SEQ ID NO: 4628 - DNA, 22 bp, synthetic construct
  misc_feature 1..22: note = Synthetic
  source 1..22: mol_type = other DNA
attaccttcactggctgagtgg

SEQ ID NO: 4629 - DNA, 22 bp, synthetic construct
  misc_feature 1..22: note = Synthetic
  source 1..22: mol_type = other DNA
ttagacaaaatctcttccacat

SEQ ID NO: 4630 - DNA, 22 bp, synthetic construct
  misc_feature 1..22: note = Synthetic
  source 1..22: mol_type = other DNA
cttgaactgctatttcagtttc

SEQ ID NO: 4631 - DNA, 22 bp, synthetic construct
  misc_feature 1..22: note = Synthetic
  source 1..22: mol_type = other DNA
ttgaactgctatttcagtttcc

SEQ ID NO: 4632 - DNA, 22 bp, synthetic construct
  misc_feature 1..22: note = Synthetic
  source 1..22: mol_type = other DNA
tgaactgctatttcagtttcct

SEQ ID NO: 4633 - DNA, 22 bp, synthetic construct
  misc_feature 1..22: note = Synthetic
  source 1..22: mol_type = other DNA
aaaaccagccactcagccagtg

SEQ ID NO: 4634 - DNA, 22 bp, synthetic construct
  misc_feature 1..22: note = Synthetic
  source 1..22: mol_type = other DNA
gtctaaagggcagcatttgtac

SEQ ID NO: 4635 - DNA, 22 bp, synthetic construct
  misc_feature 1..22: note = Synthetic
  source 1..22: mol_type = other DNA
atgtggaagagattttgtctaa

SEQ ID NO: 4636 - DNA, 22 bp, synthetic construct
  misc_feature 1..22: note = Synthetic
  source 1..22: mol_type = other DNA
gatgtggaagagattttgtcta

SEQ ID NO: 4637 - DNA, 22 bp, synthetic construct
  misc_feature 1..22: note = Synthetic
  source 1..22: mol_type = other DNA
agttcaagctaaacaaccggat

SEQ ID NO: 4638 - DNA, 22 bp, synthetic construct
  misc_feature 1..22: note = Synthetic
  source 1..22: mol_type = other DNA
aatagcagttcaagctaaacaa

SEQ ID NO: 4639 - DNA, 22 bp, synthetic construct
  misc_feature 1..22: note = Synthetic
  source 1..22: mol_type = other DNA
gattgttctagcctcttgattg

SEQ ID NO: 4640 - DNA, 22 bp, synthetic construct
  misc_feature 1..22: note = Synthetic
  source 1..22: mol_type = other DNA
tgctggtcttgtttttcaaatt

SEQ ID NO: 4641 - DNA, 22 bp, synthetic construct
  misc_feature 1..22: note = Synthetic
  source 1..22: mol_type = other DNA
gctggtcttgtttttcaaattt

SEQ ID NO: 4642 - DNA, 22 bp, synthetic construct
  misc_feature 1..22: note = Synthetic
  source 1..22: mol_type = other DNA
cttgtttttcaaattttgggca

SEQ ID NO: 4643 - DNA, 22 bp, synthetic construct
  misc_feature 1..22: note = Synthetic
  source 1..22: mol_type = other DNA
cagcggtaatgagttcttccaa

SEQ ID NO: 4644 - DNA, 22 bp, synthetic construct
  misc_feature 1..22: note = Synthetic
  source 1..22: mol_type = other DNA
agcggtaatgagttcttccaac

SEQ ID NO: 4645 - DNA, 22 bp, synthetic construct
  misc_feature 1..22: note = Synthetic
  source 1..22: mol_type = other DNA
gcggtaatgagttcttccaact

SEQ ID NO: 4646 - DNA, 22 bp, synthetic construct
  misc_feature 1..22: note = Synthetic
  source 1..22: mol_type = other DNA
tcaagaggctagaacaatcatt

SEQ ID NO: 4647 - DNA, 22 bp, synthetic construct
  misc_feature 1..22: note = Synthetic
  source 1..22: mol_type = other DNA
gaaaaacaagaccagcaatcaa

SEQ ID NO: 4648 - DNA, 22 bp, synthetic construct
  misc_feature 1..22: note = Synthetic
  source 1..22: mol_type = other DNA
tttggaacagaggcgtccccag

SEQ ID NO: 4649 - DNA, 22 bp, synthetic construct
  misc_feature 1..22: note = Synthetic
  source 1..22: mol_type = other DNA
caacaatgcaggatttggaaca

SEQ ID NO: 4650 - DNA, 22 bp, synthetic construct
  misc_feature 1..22: note = Synthetic
  source 1..22: mol_type = other DNA
cttacaggcaacaatgcaggat

SEQ ID NO: 4651 - DNA, 22 bp, synthetic construct
  misc_feature 1..22: note = Synthetic
  source 1..22: mol_type = other DNA
tttgttcttacaggcaacaatg

SEQ ID NO: 4652 - DNA, 22 bp, synthetic construct
  misc_feature 1..22: note = Synthetic
  source 1..22: mol_type = other DNA
ccttttatgaatgcttctccaa

SEQ ID NO: 4653 - DNA, 22 bp, synthetic construct
  misc_feature 1..22: note = Synthetic
  source 1..22: mol_type = other DNA
cattgatattctctgttatcat

SEQ ID NO: 4654 - DNA, 22 bp, synthetic construct
  misc_feature 1..22: note = Synthetic
  source 1..22: mol_type = other DNA
ctctgttatcatgtggactttt

SEQ ID NO: 4655 - DNA, 22 bp, synthetic construct
  misc_feature 1..22: note = Synthetic
  source 1..22: mol_type = other DNA
tggtatcatctgcagaataatc

SEQ ID NO: 4656 - DNA, 22 bp, synthetic construct
  misc_feature 1..22: note = Synthetic
  source 1..22: mol_type = other DNA
cagaataatcccggagaagttt

SEQ ID NO: 4657 - DNA, 22 bp, synthetic construct
  misc_feature 1..22: note = Synthetic
  source 1..22: mol_type = other DNA
agaataatcccggagaagtttc

SEQ ID NO: 4658 - DNA, 22 bp, synthetic construct
  misc_feature 1..22: note = Synthetic
  source 1..22: mol_type = other DNA
ccacatctacatttgtctgcca

SEQ ID NO: 4659 - DNA, 22 bp, synthetic construct
  misc_feature 1..22: note = Synthetic
  source 1..22: mol_type = other DNA
catctacatttgtctgccactg

SEQ ID NO: 4660 - DNA, 22 bp, synthetic construct
  misc_feature 1..22: note = Synthetic
  source 1..22: mol_type = other DNA
ctacatttgtctgccactggcg

SEQ ID NO: 4661 - DNA, 22 bp, synthetic construct
  misc_feature 1..22: note = Synthetic
  source 1..22: mol_type = other DNA
tgtctgccactggcggaggtct

SEQ ID NO: 4662 - DNA, 22 bp, synthetic construct
  misc_feature 1..22: note = Synthetic
  source 1..22: mol_type = other DNA
cctcttggagaagcattcataa

SEQ ID NO: 4663 - DNA, 22 bp, synthetic construct
  misc_feature 1..22: note = Synthetic
  source 1..22: mol_type = other DNA
taacagagaatatcaatgcctc

SEQ ID NO: 4664 - DNA, 22 bp, synthetic construct
  misc_feature 1..22: note = Synthetic
  source 1..22: mol_type = other DNA
tgacttggccctgaaacttctc

SEQ ID NO: 4665 - DNA, 22 bp, synthetic construct
  misc_feature 1..22: note = Synthetic
  source 1..22: mol_type = other DNA
atgacttggccctgaaacttct

SEQ ID NO: 4666 - DNA, 22 bp, synthetic construct
  misc_feature 1..22: note = Synthetic
  source 1..22: mol_type = other DNA
aaatgtagatgtggcaaatgac

SEQ ID NO: 4667 - DNA, 22 bp, synthetic construct
  misc_feature 1..22: note = Synthetic
  source 1..22: mol_type = other DNA
ccagtggcagacaaatgtagat

SEQ ID NO: 4668 - DNA, 22 bp, synthetic construct
  misc_feature 1..22: note = Synthetic
  source 1..22: mol_type = other DNA
agttggccaaagacctccgcca

SEQ ID NO: 4669 - DNA, 22 bp, synthetic construct
  misc_feature 1..22: note = Synthetic
  source 1..22: mol_type = other DNA
ttctcataaaaatctatagcag

SEQ ID NO: 4670 - DNA, 22 bp, synthetic construct
  misc_feature 1..22: note = Synthetic
  source 1..22: mol_type = other DNA
tttcatcagctcttttactccc

SEQ ID NO: 4671 - DNA, 22 bp, synthetic construct
  misc_feature 1..22: note = Synthetic
  source 1..22: mol_type = other DNA
cttttactcccttggagtcttc

SEQ ID NO: 4672 - DNA, 22 bp, synthetic construct
  misc_feature 1..22: note = Synthetic
  source 1..22: mol_type = other DNA
agtcttctaggagcctttcctt

SEQ ID NO: 4673 - DNA, 22 bp, synthetic construct
  misc_feature 1..22: note = Synthetic
  source 1..22: mol_type = other DNA
gtcttctaggagcctttcctta

SEQ ID NO: 4674 - DNA, 22 bp, synthetic construct
  misc_feature 1..22: note = Synthetic
  source 1..22: mol_type = other DNA
tttccttacgggtagcatcctg

SEQ ID NO: 4675 - DNA, 22 bp, synthetic construct
  misc_feature 1..22: note = Synthetic
  source 1..22: mol_type = other DNA
acgggtagcatcctgtaggaca

SEQ ID NO: 4676 - DNA, 22 bp, synthetic construct
  misc_feature 1..22: note = Synthetic
  source 1..22: mol_type = other DNA
agttgtttcagcttctgtaagc

SEQ ID NO: 4677 - DNA, 22 bp, synthetic construct
  misc_feature 1..22: note = Synthetic
  source 1..22: mol_type = other DNA
taagccaggcaagaaacttttc

SEQ ID NO: 4678 - DNA, 22 bp, synthetic construct
  misc_feature 1..22: note = Synthetic
  source 1..22: mol_type = other DNA
aggcaagaaacttttccaggtc

SEQ ID NO: 4679 - DNA, 22 bp, synthetic construct
  misc_feature 1..22: note = Synthetic
  source 1..22: mol_type = other DNA
ggcaagaaacttttccaggtcc

SEQ ID NO: 4680 - DNA, 22 bp, synthetic construct
  misc_feature 1..22: note = Synthetic
  source 1..22: mol_type = other DNA
gcaagaaacttttccaggtcca

SEQ ID NO: 4681 - DNA, 22 bp, synthetic construct
  misc_feature 1..22: note = Synthetic
  source 1..22: mol_type = other DNA
caagaaacttttccaggtccag

SEQ ID NO: 4682 - DNA, 22 bp, synthetic construct
  misc_feature 1..22: note = Synthetic
  source 1..22: mol_type = other DNA
gagtaaaagagctgatgaaaca

SEQ ID NO: 4683 - DNA, 22 bp, synthetic construct
  misc_feature 1..22: note = Synthetic
  source 1..22: mol_type = other DNA
gaaaggctcctagaagactcca

SEQ ID NO: 4684 - DNA, 22 bp, synthetic construct
  misc_feature 1..22: note = Synthetic
  source 1..22: mol_type = other DNA
ggaaaggctcctagaagactcc

SEQ ID NO: 4685 - DNA, 22 bp, synthetic construct
  misc_feature 1..22: note = Synthetic
  source 1..22: mol_type = other DNA
tacaggatgctacccgtaagga

SEQ ID NO: 4686 - DNA, 22 bp, synthetic construct
  misc_feature 1..22: note = Synthetic
  source 1..22: mol_type = other DNA
tgtcctacaggatgctacccgt

SEQ ID NO: 4687 - DNA, 22 bp, synthetic construct
  misc_feature 1..22: note = Synthetic
  source 1..22: mol_type = other DNA
tgaaacaactgccaatgtccta

SEQ ID NO: 4688 - DNA, 22 bp, synthetic construct
  misc_feature 1..22: note = Synthetic
  source 1..22: mol_type = other DNA
tggacctggaaaagtttcttgc

SEQ ID NO: 4689 - DNA, 22 bp, synthetic construct
  misc_feature 1..22: note = Synthetic
  source 1..22: mol_type = other DNA
actgcaacagttccccctggac

SEQ ID NO: 4690 - DNA, 22 bp, synthetic construct
  misc_feature 1..22: note = Synthetic
  source 1..22: mol_type = other DNA
tagattactgcaacagttcccc

SEQ ID NO: 4691 - DNA, 22 bp, synthetic construct
  misc_feature 1..22: note = Synthetic
  source 1..22: mol_type = other DNA
ggtgagtgagcgagaggctgct

SEQ ID NO: 4692 - DNA, 22 bp, synthetic construct
  misc_feature 1..22: note = Synthetic
  source 1..22: mol_type = other DNA
cctttgcagggtgagtgagcga

SEQ ID NO: 4693 - DNA, 22 bp, synthetic construct
  misc_feature 1..22: note = Synthetic
  source 1..22: mol_type = other DNA
tgttatccaaacgtctttgtaa

SEQ ID NO: 4694 - DNA, 22 bp, synthetic construct
  misc_feature 1..22: note = Synthetic
  source 1..22: mol_type = other DNA
tctttgtaacaggactgcatca

SEQ ID NO: 4695 - DNA, 22 bp, synthetic construct
  misc_feature 1..22: note = Synthetic
  source 1..22: mol_type = other DNA
ggactgcatcatcggaaccttc

SEQ ID NO: 4696 - DNA, 22 bp, synthetic construct
  misc_feature 1..22: note = Synthetic
  source 1..22: mol_type = other DNA
gactgcatcatcggaaccttcc

SEQ ID NO: 4697 - DNA, 22 bp, synthetic construct
  misc_feature 1..22: note = Synthetic
  source 1..22: mol_type = other DNA
catcggaaccttccagggatct

SEQ ID NO: 4698 - DNA, 22 bp, synthetic construct
  misc_feature 1..22: note = Synthetic
  source 1..22: mol_type = other DNA
cttccagggatctcaggatttt

SEQ ID NO: 4699 - DNA, 22 bp, synthetic construct
  misc_feature 1..22: note = Synthetic
  source 1..22: mol_type = other DNA
ggattttttggctgttttcatc

SEQ ID NO: 4700 - DNA, 22 bp, synthetic construct
  misc_feature 1..22: note = Synthetic
  source 1..22: mol_type = other DNA
ctgtgtgagcttcaatttcacc

SEQ ID NO: 4701 - DNA, 22 bp, synthetic construct
  misc_feature 1..22: note = Synthetic
  source 1..22: mol_type = other DNA
tgtgagcttcaatttcaccttg

SEQ ID NO: 4702 - DNA, 22 bp, synthetic construct
  misc_feature 1..22: note = Synthetic
  source 1..22: mol_type = other DNA
caatttcaccttggaggtccta

SEQ ID NO: 4703 - DNA, 22 bp, synthetic construct
  misc_feature 1..22: note = Synthetic
  source 1..22: mol_type = other DNA
gaaaaagtctctcaacattagg

SEQ ID NO: 4704 - DNA, 22 bp, synthetic construct
  misc_feature 1..22: note = Synthetic
  source 1..22: mol_type = other DNA
ttcggaaaaagtctctcaacat

SEQ ID NO: 4705 - DNA, 22 bp, synthetic construct
  misc_feature 1..22: note = Synthetic
  source 1..22: mol_type = other DNA
tgaacttcaagtggagtgaact

SEQ ID NO: 4706 - DNA, 22 bp, synthetic construct
  misc_feature 1..22: note = Synthetic
  source 1..22: mol_type = other DNA
gtttggataacatgaacttcaa

SEQ ID NO: 4707 - DNA, 22 bp, synthetic construct
  misc_feature 1..22: note = Synthetic
  source 1..22: mol_type = other DNA
tgcagtcctgttacaaagacgt

SEQ ID NO: 4708 - DNA, 22 bp, synthetic construct
  misc_feature 1..22: note = Synthetic
  source 1..22: mol_type = other DNA
caaaaaatcctgagatccctgg

SEQ ID NO: 4709 - DNA, 22 bp, synthetic construct
  misc_feature 1..22: note = Synthetic
  source 1..22: mol_type = other DNA
cagccaaaaaatcctgagatcc

SEQ ID NO: 4710 - DNA, 22 bp, synthetic construct
  misc_feature 1..22: note = Synthetic
  source 1..22: mol_type = other DNA
tcacacagatgtttatcacaac

SEQ ID NO: 4711 - DNA, 22 bp, synthetic construct
  misc_feature 1..22: note = Synthetic
  source 1..22: mol_type = other DNA
cctgctgtcctgtaggacctcc

SEQ ID NO: 4712 - DNA, 22 bp, synthetic construct
  misc_feature 1..22: note = Synthetic
  source 1..22: mol_type = other DNA
acatcgttctgcttctgaactg

SEQ ID NO: 4713 - DNA, 22 bp, synthetic construct
  misc_feature 1..22: note = Synthetic
  source 1..22: mol_type = other DNA
actgctggaaagtcgcctccaa

SEQ ID NO: 4714 - DNA, 22 bp, synthetic construct
  misc_feature 1..22: note = Synthetic
  source 1..22: mol_type = other DNA
agtcgcctccaataggtgcctg

SEQ ID NO: 4715 - DNA, 22 bp, synthetic construct
  misc_feature 1..22: note = Synthetic
  source 1..22: mol_type = other DNA
acaccagaagttcctgcagaga

SEQ ID NO: 4716 - DNA, 22 bp, synthetic construct
  misc_feature 1..22: note = Synthetic
  source 1..22: mol_type = other DNA
gagaaaggtgcagacgcttcca

SEQ ID NO: 4717 - DNA, 22 bp, synthetic construct
  misc_feature 1..22: note = Synthetic
  source 1..22: mol_type = other DNA
cagacgcttccactggtcagaa

SEQ ID NO: 4718 - DNA, 22 bp, synthetic construct
  misc_feature 1..22: note = Synthetic
  source 1..22: mol_type = other DNA
actggtcagaactggcttccaa

SEQ ID NO: 4719 - DNA, 22 bp, synthetic construct
  misc_feature 1..22: note = Synthetic
  source 1..22: mol_type = other DNA
ctggtcagaactggcttccaaa

SEQ ID NO: 4720 - DNA, 22 bp, synthetic construct
  misc_feature 1..22: note = Synthetic
  source 1..22: mol_type = other DNA
aagcagaacgatgtacataggg

SEQ ID NO: 4721 - DNA, 22 bp, synthetic construct
  misc_feature 1..22: note = Synthetic
  source 1..22: mol_type = other DNA
tcagaagcagaacgatgtacat

SEQ ID NO: 4722 - DNA, 22 bp, synthetic construct
  misc_feature 1..22: note = Synthetic
  source 1..22: mol_type = other DNA
ttcagaagcagaacgatgtaca

SEQ ID NO: 4723 - DNA, 22 bp, synthetic construct
  misc_feature 1..22: note = Synthetic
  source 1..22: mol_type = other DNA
ttaagccggcaggcacctattg

SEQ ID NO: 4724 - DNA, 22 bp, synthetic construct
  misc_feature 1..22: note = Synthetic
  source 1..22: mol_type = other DNA
gaattaagccggcaggcaccta

SEQ ID NO: 4725 - DNA, 22 bp, synthetic construct
  misc_feature 1..22: note = Synthetic
  source 1..22: mol_type = other DNA
gaaagatgatgaattaagccgg

SEQ ID NO: 4726 - DNA, 22 bp, synthetic construct
  misc_feature 1..22: note = Synthetic
  source 1..22: mol_type = other DNA
agctgaaagatgatgaattaag

SEQ ID NO: 4727 - DNA, 22 bp, synthetic construct
  misc_feature 1..22: note = Synthetic
  source 1..22: mol_type = other DNA
tttctctgcaggaacttctggt

SEQ ID NO: 4728 - DNA, 22 bp, synthetic construct
  misc_feature 1..22: note = Synthetic
  source 1..22: mol_type = other DNA
gcacctttctctgcaggaactt

SEQ ID NO: 4729 - DNA, 22 bp, synthetic construct
  misc_feature 1..22: note = Synthetic
  source 1..22: mol_type = other DNA
gaagcgtctgcacctttctctg

SEQ ID NO: 4730 - DNA, 22 bp, synthetic construct
  misc_feature 1..22: note = Synthetic
  source 1..22: mol_type = other DNA
atttggaagccagttctgacca

SEQ ID NO: 4731 - DNA, 22 bp, synthetic construct
  misc_feature 1..22: note = Synthetic
  source 1..22: mol_type = other DNA
gctgttctttttcaggtcccat

SEQ ID NO: 4732 - DNA, 22 bp, synthetic construct
  misc_feature 1..22: note = Synthetic
  source 1..22: mol_type = other DNA
tagttccacattcaattacctc

SEQ ID NO: 4733 - DNA, 22 bp, synthetic construct
  misc_feature 1..22: note = Synthetic
  source 1..22: mol_type = other DNA
acattcaattacctctgggctc

SEQ ID NO: 4734 - DNA, 22 bp, synthetic construct
  misc_feature 1..22: note = Synthetic
  source 1..22: mol_type = other DNA
tagagtttctctagtccttcca

SEQ ID NO: 4735 - DNA, 22 bp, synthetic construct
  misc_feature 1..22: note = Synthetic
  source 1..22: mol_type = other DNA
gtctcaagagtactcatgatta

SEQ ID NO: 4736 - DNA, 22 bp, synthetic construct
  misc_feature 1..22: note = Synthetic
  source 1..22: mol_type = other DNA
tttagttttcaattccctcttg

SEQ ID NO: 4737 - DNA, 22 bp, synthetic construct
  misc_feature 1..22: note = Synthetic
  source 1..22: mol_type = other DNA
gagaaactctaccaggagccca

SEQ ID NO: 4738 - DNA, 22 bp, synthetic construct
  misc_feature 1..22: note = Synthetic
  source 1..22: mol_type = other DNA
ggaaggactagagaaactctac

SEQ ID NO: 4739 - DNA, 22 bp, synthetic construct
  misc_feature 1..22: note = Synthetic
  source 1..22: mol_type = other DNA
tttctgacagagcagcctttgg

SEQ ID NO: 4740 - DNA, 22 bp, synthetic construct
  misc_feature 1..22: note = Synthetic
  source 1..22: mol_type = other DNA
aatatttctgacagagcagcct

SEQ ID NO: 4741 - DNA, 22 bp, synthetic construct
  misc_feature 1..22: note = Synthetic
  source 1..22: mol_type = other DNA
tctcatttcacaggccttcaag

SEQ ID NO: 4742 - DNA, 22 bp, synthetic construct
  misc_feature 1..22: note = Synthetic
  source 1..22: mol_type = other DNA
atctcatttcacaggccttcaa

SEQ ID NO: 4743 - DNA, 22 bp, synthetic construct
  misc_feature 1..22: note = Synthetic
  source 1..22: mol_type = other DNA
tagacggtaccttgactttctc

SEQ ID NO: 4744 - DNA, 22 bp, synthetic construct
  misc_feature 1..22: note = Synthetic
  source 1..22: mol_type = other DNA
ccttgactttctcgaggtgatc

SEQ ID NO: 4745 - DNA, 22 bp, synthetic construct
  misc_feature 1..22: note = Synthetic
  source 1..22: mol_type = other DNA
ggtgatcttggagagagtcaat

SEQ ID NO: 4746 - DNA, 22 bp, synthetic construct
  misc_feature 1..22: note = Synthetic
  source 1..22: mol_type = other DNA
agagtcaatgaggagatcgccc

SEQ ID NO: 4747 - DNA, 22 bp, synthetic construct
  misc_feature 1..22: note = Synthetic
  source 1..22: mol_type = other DNA
gagtcaatgaggagatcgccca

SEQ ID NO: 4748 - DNA, 22 bp, synthetic construct
  misc_feature 1..22: note = Synthetic
  source 1..22: mol_type = other DNA
gaggagatcgcccacgggctgc

SEQ ID NO: 4749 - DNA, 22 bp, synthetic construct
  misc_feature 1..22: note = Synthetic
  source 1..22: mol_type = other DNA
aggatcccttgatcacctcagc

SEQ ID NO: 4750 - DNA, 22 bp, synthetic construct
  misc_feature 1..22: note = Synthetic
  source 1..22: mol_type = other DNA
tcacctcagcttggcgcagctt

SEQ ID NO: 4751 - DNA, 22 bp, synthetic construct
  misc_feature 1..22: note = Synthetic
  source 1..22: mol_type = other DNA
cagcttgaggtccagctcatcc

SEQ ID NO: 4752 - DNA, 22 bp, synthetic construct
  misc_feature 1..22: note = Synthetic
  source 1..22: mol_type = other DNA
catccgtggcctcttgaagttc

SEQ ID NO: 4753 - DNA, 22 bp, synthetic construct
  misc_feature 1..22: note = Synthetic
  source 1..22: mol_type = other DNA
cttgaagttcccggagtctttc

SEQ ID NO: 4754 - DNA, 22 bp, synthetic construct
  misc_feature 1..22: note = Synthetic
  source 1..22: mol_type = other DNA
ttgaagttcccggagtctttca

SEQ ID NO: 4755 - DNA, 22 bp, synthetic construct
  misc_feature 1..22: note = Synthetic
  source 1..22: mol_type = other DNA
atctatttttctctgccagtca

SEQ ID NO: 4756 - DNA, 22 bp, synthetic construct
  misc_feature 1..22: note = Synthetic
  source 1..22: mol_type = other DNA
ttctctgccagtcagcggagtg

SEQ ID NO: 4757 - DNA, 22 bp, synthetic construct
  misc_feature 1..22: note = Synthetic
  source 1..22: mol_type = other DNA
ttcgtagaagccgagtgacatt

SEQ ID NO: 4758 - DNA, 22 bp, synthetic construct
  misc_feature 1..22: note = Synthetic
  source 1..22: mol_type = other DNA
tcgtagaagccgagtgacattc

SEQ ID NO: 4759 - DNA, 22 bp, synthetic construct
  misc_feature 1..22: note = Synthetic
  source 1..22: mol_type = other DNA
gtgacattctgggctctctcct

SEQ ID NO: 4760 - DNA, 22 bp, synthetic construct
  misc_feature 1..22: note = Synthetic
  source 1..22: mol_type = other DNA
acattctgggctctctcctcag

SEQ ID NO: 4761 - DNA, 22 bp, synthetic construct
  misc_feature 1..22: note = Synthetic
  source 1..22: mol_type = other DNA
ccaagatcacctcgagaaagtc

SEQ ID NO: 4762 - DNA, 22 bp, synthetic construct
  misc_feature 1..22: note = Synthetic
  source 1..22: mol_type = other DNA
atcaagggatcctggcagcccg

SEQ ID NO: 4763 - DNA, 22 bp, synthetic construct
  misc_feature 1..22: note = Synthetic
  source 1..22: mol_type = other DNA
gatcaagggatcctggcagccc

SEQ ID NO: 4764 - DNA, 22 bp, synthetic construct
  misc_feature 1..22: note = Synthetic
  source 1..22: mol_type = other DNA
aagctgaggtgatcaagggatc

SEQ ID NO: 4765 - DNA, 22 bp, synthetic construct
  misc_feature 1..22: note = Synthetic
  source 1..22: mol_type = other DNA
ctgcgccaagctgaggtgatca

SEQ ID NO: 4766 - DNA, 22 bp, synthetic construct
  misc_feature 1..22: note = Synthetic
  source 1..22: mol_type = other DNA
gctgcgccaagctgaggtgatc

SEQ ID NO: 4767 - DNA, 22 bp, synthetic construct
  misc_feature 1..22: note = Synthetic
  source 1..22: mol_type = other DNA
ggacctcaagctgcgccaagct

SEQ ID NO: 4768 - DNA, 22 bp, synthetic construct
  misc_feature 1..22: note = Synthetic
  source 1..22: mol_type = other DNA
acttcaagaggccacggatgag

SEQ ID NO: 4769 - DNA, 22 bp, synthetic construct
  misc_feature 1..22: note = Synthetic
  source 1..22: mol_type = other DNA
actccgggaacttcaagaggcc

SEQ ID NO: 4770 - DNA, 22 bp, synthetic construct
  misc_feature 1..22: note = Synthetic
  source 1..22: mol_type = other DNA
tgaaagactccgggaacttcaa

SEQ ID NO: 4771 - DNA, 22 bp, synthetic construct
  misc_feature 1..22: note = Synthetic
  source 1..22: mol_type = other DNA
agatgagacccttgaaagactc

SEQ ID NO: 4772 - DNA, 22 bp, synthetic construct
  misc_feature 1..22: note = Synthetic
  source 1..22: mol_type = other DNA
tagatgagacccttgaaagact

SEQ ID NO: 4773 - DNA, 22 bp, synthetic construct
  misc_feature 1..22: note = Synthetic
  source 1..22: mol_type = other DNA
aattgaacctgcactccgctga

SEQ ID NO: 4774 - DNA, 22 bp, synthetic construct
  misc_feature 1..22: note = Synthetic
  source 1..22: mol_type = other DNA
ggctgaggaggtcaatactgag

SEQ ID NO: 4775 - DNA, 22 bp, synthetic construct
  misc_feature 1..22: note = Synthetic
  source 1..22: mol_type = other DNA
aggctgaggaggtcaatactga

SEQ ID NO: 4776 - DNA, 22 bp, synthetic construct
  misc_feature 1..22: note = Synthetic
  source 1..22: mol_type = other DNA
gcttctacgaaagcaggctgag

SEQ ID NO: 4777 - DNA, 22 bp, synthetic construct
  misc_feature 1..22: note = Synthetic
  source 1..22: mol_type = other DNA
tcggcttctacgaaagcaggct

SEQ ID NO: 4778 - DNA, 22 bp, synthetic construct
  misc_feature 1..22: note = Synthetic
  source 1..22: mol_type = other DNA
tgtcactcggcttctacgaaag

SEQ ID NO: 4779 - DNA, 22 bp, synthetic construct
  misc_feature 1..22: note = Synthetic
  source 1..22: mol_type = other DNA
aggagagagcccagaatgtcac

SEQ ID NO: 4780 - DNA, 22 bp, synthetic construct
  misc_feature 1..22: note = Synthetic
  source 1..22: mol_type = other DNA
tgccaatttagagctgcctcct

SEQ ID NO: 4781 - DNA, 22 bp, synthetic construct
  misc_feature 1..22: note = Synthetic
  source 1..22: mol_type = other DNA
gcttacctgcagaagcttccat

SEQ ID NO: 4782 - DNA, 22 bp, synthetic construct
  misc_feature 1..22: note = Synthetic
  source 1..22: mol_type = other DNA
gcagaagcttccatctggtgtt

SEQ ID NO: 4783 - DNA, 22 bp, synthetic construct
  misc_feature 1..22: note = Synthetic
  source 1..22: mol_type = other DNA
tgttcaggtcttccagagtgct

SEQ ID NO: 4784 - DNA, 22 bp, synthetic construct
  misc_feature 1..22: note = Synthetic
  source 1..22: mol_type = other DNA
tcttccagagtgctgaggttat

SEQ ID NO: 4785 - DNA, 22 bp, synthetic construct
  misc_feature 1..22: note = Synthetic
  source 1..22: mol_type = other DNA
cggtgagagctgaatgcccaaa

SEQ ID NO: 4786 - DNA, 22 bp, synthetic construct
  misc_feature 1..22: note = Synthetic
  source 1..22: mol_type = other DNA
gctgaatgcccaaagtggtaag

SEQ ID NO: 4787 - DNA, 22 bp, synthetic construct
  misc_feature 1..22: note = Synthetic
  source 1..22: mol_type = other DNA
ccaaagtggtaagctggcgagc

SEQ ID NO: 4788 - DNA, 22 bp, synthetic construct
  misc_feature 1..22: note = Synthetic
  source 1..22: mol_type = other DNA
gctggcgagcaaggtcattgac

SEQ ID NO: 4789 - DNA, 22 bp, synthetic construct
  misc_feature 1..22: note = Synthetic
  source 1..22: mol_type = other DNA
acgtggctcacgttctctttca

SEQ ID NO: 4790 - DNA, 22 bp, synthetic construct
  misc_feature 1..22: note = Synthetic
  source 1..22: mol_type = other DNA
gaacaccagatggaagcttctg

SEQ ID NO: 4791 - DNA, 22 bp, synthetic construct
  misc_feature 1..22: note = Synthetic
  source 1..22: mol_type = other DNA
ctctggaagacctgaacaccag

SEQ ID NO: 4792 - DNA, 22 bp, synthetic construct
  misc_feature 1..22: note = Synthetic
  source 1..22: mol_type = other DNA
ctcaccgtataacctcagcact

SEQ ID NO: 4793 - DNA, 22 bp, synthetic construct
  misc_feature 1..22: note = Synthetic
  source 1..22: mol_type = other DNA
cttgctcgccagcttaccactt

SEQ ID NO: 4794 - DNA, 22 bp, synthetic construct
  misc_feature 1..22: note = Synthetic
  source 1..22: mol_type = other DNA
ccttgctcgccagcttaccact

SEQ ID NO: 4795 - DNA, 22 bp, synthetic construct
  misc_feature 1..22: note = Synthetic
  source 1..22: mol_type = other DNA
gactattgcacacaggcacttc

SEQ ID NO: 4796 - DNA, 22 bp, synthetic construct
  misc_feature 1..22: note = Synthetic
  source 1..22: mol_type = other DNA
ctggaaagaaagtgctgagatg

SEQ ID NO: 4797 - DNA, 22 bp, synthetic construct
  misc_feature 1..22: note = Synthetic
  source 1..22: mol_type = other DNA
gagatgctggaccaaagtccct

SEQ ID NO: 4798 - DNA, 22 bp, synthetic construct
  misc_feature 1..22: note = Synthetic
  source 1..22: mol_type = other DNA
agatgctggaccaaagtccctg

SEQ ID NO: 4799 - DNA, 22 bp, synthetic construct
  misc_feature 1..22: note = Synthetic
  source 1..22: mol_type = other DNA
gggcttcatgcagctgcctgac

SEQ ID NO: 4800 - DNA, 22 bp, synthetic construct
  misc_feature 1..22: note = Synthetic
  source 1..22: mol_type = other DNA
cagctgcctgactcggtcctcg

SEQ ID NO: 4801 - DNA, 22 bp, synthetic construct
  misc_feature 1..22: note = Synthetic
  source 1..22: mol_type = other DNA
tgactcggtcctcgacggccac

SEQ ID NO: 4802 - DNA, 22 bp, synthetic construct
  misc_feature 1..22: note = Synthetic
  source 1..22: mol_type = other DNA
gactcggtcctcgacggccacc

SEQ ID NO: 4803 - DNA, 22 bp, synthetic construct
  misc_feature 1..22: note = Synthetic
  source 1..22: mol_type = other DNA
ctgcatgaagcccacagggact

SEQ ID NO: 4804 - DNA, 22 bp, synthetic construct
  misc_feature 1..22: note = Synthetic
  source 1..22: mol_type = other DNA
caggcagctgcatgaagcccac

SEQ ID NO: 4805 - DNA, 22 bp, synthetic construct
  misc_feature 1..22: note = Synthetic
  source 1..22: mol_type = other DNA
tcaggcagctgcatgaagccca

SEQ ID NO: 4806 - DNA, 22 bp, synthetic construct
  misc_feature 1..22: note = Synthetic
  source 1..22: mol_type = other DNA
aggtggccgtcgaggaccgagt

SEQ ID NO: 4807 - DNA, 22 bp, synthetic construct
  misc_feature 1..22: note = Synthetic
  source 1..22: mol_type = other DNA
cttttcctcccaggtggccgtc

SEQ ID NO: 4808 - DNA, 22 bp, synthetic construct
  misc_feature 1..22: note = Synthetic
  source 1..22: mol_type = other DNA
acttccaacttacttgatatag

SEQ ID NO: 4809 - DNA, 22 bp, synthetic construct
  misc_feature 1..22: note = Synthetic
  source 1..22: mol_type = other DNA
cttccaacttacttgatatagt

SEQ ID NO: 4810 - DNA, 22 bp, synthetic construct
  misc_feature 1..22: note = Synthetic
  source 1..22: mol_type = other DNA
ttgatatagtagggcactttgt

SEQ ID NO: 4811 - DNA, 22 bp, synthetic construct
  misc_feature 1..22: note = Synthetic
  source 1..22: mol_type = other DNA
gtagggcactttgtttggcgag

SEQ ID NO: 4812 - DNA, 22 bp, synthetic construct
  misc_feature 1..22: note = Synthetic
  source 1..22: mol_type = other DNA
gtttggcgagatggctctctcc

SEQ ID NO: 4813 - DNA, 22 bp, synthetic construct
  misc_feature 1..22: note = Synthetic
  source 1..22: mol_type = other DNA
tttggcgagatggctctctccc

SEQ ID NO: 4814 - DNA, 22 bp, synthetic construct
  misc_feature 1..22: note = Synthetic
  source 1..22: mol_type = other DNA
agatggctctctcccagggacc

SEQ ID NO: 4815 - DNA, 22 bp, synthetic construct
  misc_feature 1..22: note = Synthetic
  source 1..22: mol_type = other DNA
ttcagcgtctgtccagggtccc

SEQ ID NO: 4816 - DNA, 22 bp, synthetic construct
  misc_feature 1..22: note = Synthetic
  source 1..22: mol_type = other DNA
tttcagcgtctgtccagggtcc

SEQ ID NO: 4817 - DNA, 22 bp, synthetic construct
  misc_feature 1..22: note = Synthetic
  source 1..22: mol_type = other DNA
cccttcttttcagcgtctgtcc

SEQ ID NO: 4818 - DNA, 22 bp, synthetic construct
  misc_feature 1..22: note = Synthetic
  source 1..22: mol_type = other DNA
tcccttcttttcagcgtctgtc

SEQ ID NO: 4819 - DNA, 22 bp, synthetic construct
  misc_feature 1..22: note = Synthetic
  source 1..22: mol_type = other DNA
tggccatgtccttacctaaaga

SEQ ID NO: 4820 - DNA, 22 bp, synthetic construct
  misc_feature 1..22: note = Synthetic
  source 1..22: mol_type = other DNA
agactggtagagctctgtcatt

SEQ ID NO: 4821 - DNA, 22 bp, synthetic construct
  misc_feature 1..22: note = Synthetic
  source 1..22: mol_type = other DNA
gactggtagagctctgtcattt

SEQ ID NO: 4822 - DNA, 22 bp, synthetic construct
  misc_feature 1..22: note = Synthetic
  source 1..22: mol_type = other DNA
ggtagagctctgtcattttggg

SEQ ID NO: 4823 - DNA, 22 bp, synthetic construct
  misc_feature 1..22: note = Synthetic
  source 1..22: mol_type = other DNA
cccagcaagttgtttgagtctc

SEQ ID NO: 4824 - DNA, 22 bp, synthetic construct
  misc_feature 1..22: note = Synthetic
  source 1..22: mol_type = other DNA
agagctctaccagtctttaggt

SEQ ID NO: 4825 - DNA, 22 bp, synthetic construct
  misc_feature 1..22: note = Synthetic
  source 1..22: mol_type = other DNA
atgacagagctctaccagtctt

SEQ ID NO: 4826 - DNA, 22 bp, synthetic construct
  misc_feature 1..22: note = Synthetic
  source 1..22: mol_type = other DNA
ccacgagactcaaacaacttgc

SEQ ID NO: 4827 - DNA, 22 bp, synthetic construct
  misc_feature 1..22: note = Synthetic
  source 1..22: mol_type = other DNA
gccacgagactcaaacaacttg

SEQ ID NO: 4828 - DNA, 22 bp, synthetic construct
  misc_feature 1..22: note = Synthetic
  source 1..22: mol_type = other DNA
atactggccaatacttacagca

SEQ ID NO: 4829 - DNA, 22 bp, synthetic construct
  misc_feature 1..22: note = Synthetic
  source 1..22: mol_type = other DNA
tactggccaatacttacagcaa

SEQ ID NO: 4830 - DNA, 22 bp, synthetic construct
  misc_feature 1..22: note = Synthetic
  source 1..22: mol_type = other DNA
agcaaagggccttctgcagtct

SEQ ID NO: 4831 - DNA, 22 bp, synthetic construct
  misc_feature 1..22: note = Synthetic
  source 1..22: mol_type = other DNA
cttctgcagtcttcggagtttc

SEQ ID NO: 4832 - DNA, 22 bp, synthetic construct
  misc_feature 1..22: note = Synthetic
  source 1..22: mol_type = other DNA
aagctgagaatctgacattatt

SEQ ID NO: 4833 - DNA, 22 bp, synthetic construct
  misc_feature 1..22: note = Synthetic
  source 1..22: mol_type = other DNA
catgaaactccgaagactgcag

SEQ ID NO: 4834 - DNA, 22 bp, synthetic construct
  misc_feature 1..22: note = Synthetic
  source 1..22: mol_type = other DNA
ataatgtcagattctcagctta

SEQ ID NO: 4835 - DNA, 22 bp, synthetic construct
  misc_feature 1..22: note = Synthetic
  source 1..22: mol_type = other DNA
ttcagacacatatccacgcaga

SEQ ID NO: 4836 - DNA, 22 bp, synthetic construct
  misc_feature 1..22: note = Synthetic
  source 1..22: mol_type = other DNA
tcagacacatatccacgcagag

SEQ ID NO: 4837 - DNA, 22 bp, synthetic construct
  misc_feature 1..22: note = Synthetic
  source 1..22: mol_type = other DNA
ccaaattgttgtgctcttgctc

SEQ ID NO: 4838 - DNA, 22 bp, synthetic construct
  misc_feature 1..22: note = Synthetic
  source 1..22: mol_type = other DNA
aattgttgtgctcttgctccag

SEQ ID NO: 4839 - DNA, 22 bp, synthetic construct
  misc_feature 1..22: note = Synthetic
  source 1..22: mol_type = other DNA
ttgctccaggcggtcataaata

SEQ ID NO: 4840 - DNA, 22 bp, synthetic construct
  misc_feature 1..22: note = Synthetic
  source 1..22: mol_type = other DNA
tggtcaaacaattaataatctg

SEQ ID NO: 4841 - DNA, 22 bp, synthetic construct
  misc_feature 1..22: note = Synthetic
  source 1..22: mol_type = other DNA
attaataatctgcaggatatcc

SEQ ID NO: 4842 - DNA, 22 bp, synthetic construct
  misc_feature 1..22: note = Synthetic
  source 1..22: mol_type = other DNA
ttaataatctgcaggatatcca

SEQ ID NO: 4843 - DNA, 22 bp, synthetic construct
  misc_feature 1..22: note = Synthetic
  source 1..22: mol_type = other DNA
taatctgcaggatatccatggg

SEQ ID NO: 4844 - DNA, 22 bp, synthetic construct
  misc_feature 1..22: note = Synthetic
  source 1..22: mol_type = other DNA
ccatgggctggtcattttgctt

SEQ ID NO: 4845 - DNA, 22 bp, synthetic construct
  misc_feature 1..22: note = Synthetic
  source 1..22: mol_type = other DNA
ggtcattttgcttgaggttgtg

SEQ ID NO: 4846 - DNA, 22 bp, synthetic construct
  misc_feature 1..22: note = Synthetic
  source 1..22: mol_type = other DNA
ttgcttgaggttgtgctggtcc

SEQ ID NO: 4847 - DNA, 22 bp, synthetic construct
  misc_feature 1..22: note = Synthetic
  source 1..22: mol_type = other DNA
ccaaggcatcacatgcagctga

SEQ ID NO: 4848 - DNA, 22 bp, synthetic construct
  misc_feature 1..22: note = Synthetic
  source 1..22: mol_type = other DNA
tctgcgtggatatgtgtctgaa

SEQ ID NO: 4849 - DNA, 22 bp, synthetic construct
  misc_feature 1..22: note = Synthetic
  source 1..22: mol_type = other DNA
tttggtcaacgtccctctctgc

SEQ ID NO: 4850 - DNA, 22 bp, synthetic construct
  misc_feature 1..22: note = Synthetic
  source 1..22: mol_type = other DNA
cctggagcaagagcacaacaat

SEQ ID NO: 4851 - DNA, 22 bp, synthetic construct
  misc_feature 1..22: note = Synthetic
  source 1..22: mol_type = other DNA
tttgaccactatttatgaccgc

SEQ ID NO: 4852 - DNA, 22 bp, synthetic construct
  misc_feature 1..22: note = Synthetic
  source 1..22: mol_type = other DNA
cctcaagcaaaatgaccagccc

SEQ ID NO: 4853 - DNA, 22 bp, synthetic construct
  misc_feature 1..22: note = Synthetic
  source 1..22: mol_type = other DNA
cctgtcagctgcatgtgatgcc

SEQ ID NO: 4854 - DNA, 22 bp, synthetic construct
  misc_feature 1..22: note = Synthetic
  source 1..22: mol_type = other DNA
tgtcttccaaatgtgctttaca

SEQ ID NO: 4855 - DNA, 22 bp, synthetic construct
  misc_feature 1..22: note = Synthetic
  source 1..22: mol_type = other DNA
gtcttccaaatgtgctttacac

SEQ ID NO: 4856 - DNA, 22 bp, synthetic construct
  misc_feature 1..22: note = Synthetic
  source 1..22: mol_type = other DNA
aaatgatgccagttttaaaaga

SEQ ID NO: 4857 - DNA, 22 bp, synthetic construct
  misc_feature 1..22: note = Synthetic
  source 1..22: mol_type = other DNA
tgccagttttaaaagacaggac

SEQ ID NO: 4858 - DNA, 22 bp, synthetic construct
  misc_feature 1..22: note = Synthetic
  source 1..22: mol_type = other DNA
catttccctgtgtaaagcacat

SEQ ID NO: 4859 - DNA, 22 bp, synthetic construct
  misc_feature 1..22: note = Synthetic
  source 1..22: mol_type = other DNA
atccgtgtcctgtcttttaaaa

SEQ ID NO: 4860 - DNA, 22 bp, synthetic construct
  misc_feature 1..22: note = Synthetic
  source 1..22: mol_type = other DNA
ttcataataggggacgaacagg

SEQ ID NO: 4861 - DNA, 22 bp, synthetic construct
  misc_feature 1..22: note = Synthetic
  source 1..22: mol_type = other DNA
ttcttcataataggggacgaac

SEQ ID NO: 4862 - DNA, 22 bp, synthetic construct
  misc_feature 1..22: note = Synthetic
  source 1..22: mol_type = other DNA
attcttcataataggggacgaa

SEQ ID NO: 4863 - DNA, 22 bp, synthetic construct
  misc_feature 1..22: note = Synthetic
  source 1..22: mol_type = other DNA
tagaaggtgaataacttacaaa

SEQ ID NO: 4864 - DNA, 22 bp, synthetic construct
  misc_feature 1..22: note = Synthetic
  source 1..22: mol_type = other DNA
aacttacaaattggaagcagct

SEQ ID NO: 4865 - DNA, 22 bp, synthetic construct
  misc_feature 1..22: note = Synthetic
  source 1..22: mol_type = other DNA
aattggaagcagctccggacac

SEQ ID NO: 4866 - DNA, 22 bp, synthetic construct
  misc_feature 1..22: note = Synthetic
  source 1..22: mol_type = other DNA
tggctcaatgttactgccccca

SEQ ID NO: 4867 - DNA, 22 bp, synthetic construct
  misc_feature 1..22: note = Synthetic
  source 1..22: mol_type = other DNA
gatgcaacttcacccaactgtc

SEQ ID NO: 4868 - DNA, 22 bp, synthetic construct
  misc_feature 1..22: note = Synthetic
  source 1..22: mol_type = other DNA
cttcacccaactgtcttggaat

SEQ ID NO: 4869 - DNA, 22 bp, synthetic construct
  misc_feature 1..22: note = Synthetic
  source 1..22: mol_type = other DNA
gaatttggatagaatcatgcag

SEQ ID NO: 4870 - DNA, 22 bp, synthetic construct
  misc_feature 1..22: note = Synthetic
  source 1..22: mol_type = other DNA
tttggatagaatcatgcagaag

SEQ ID NO: 4871 - DNA, 22 bp, synthetic construct
  misc_feature 1..22: note = Synthetic
  source 1..22: mol_type = other DNA
gcagaaggaggcccagcctgcg

SEQ ID NO: 4872 - DNA, 22 bp, synthetic construct
  misc_feature 1..22: note = Synthetic
  source 1..22: mol_type = other DNA
ttgaacttgccacttgcttgaa

SEQ ID NO: 4873 - DNA, 22 bp, synthetic construct
  misc_feature 1..22: note = Synthetic
  source 1..22: mol_type = other DNA
gcagtaacattgagccaagtgt

SEQ ID NO: 4874 - DNA, 22 bp, synthetic construct
  misc_feature 1..22: note = Synthetic
  source 1..22: mol_type = other DNA
ttgggtgaagttgcatcctttg

SEQ ID NO: 4875 - DNA, 22 bp, synthetic construct
  misc_feature 1..22: note = Synthetic
  source 1..22: mol_type = other DNA
gttgggtgaagttgcatccttt

SEQ ID NO: 4876 - DNA, 22 bp, synthetic construct
  misc_feature 1..22: note = Synthetic
  source 1..22: mol_type = other DNA
agttgggtgaagttgcatcctt

SEQ ID NO: 4877 - DNA, 22 bp, synthetic construct
  misc_feature 1..22: note = Synthetic
  source 1..22: mol_type = other DNA
cagttgggtgaagttgcatcct

SEQ ID NO: 4878 - DNA, 22 bp, synthetic construct
  misc_feature 1..22: note = Synthetic
  source 1..22: mol_type = other DNA
tctatccaaattccaagacagt

SEQ ID NO: 4879 - DNA, 22 bp, synthetic construct
  misc_feature 1..22: note = Synthetic
  source 1..22: mol_type = other DNA
ttctatccaaattccaagacag

SEQ ID NO: 4880 - DNA, 22 bp, synthetic construct
  misc_feature 1..22: note = Synthetic
  source 1..22: mol_type = other DNA
ggattttgtgaccagcgcaggc

SEQ ID NO: 4881 - DNA, 22 bp, synthetic construct
  misc_feature 1..22: note = Synthetic
  source 1..22: mol_type = other DNA
aggattttgtgaccagcgcagg

SEQ ID NO: 4882 - DNA, 22 bp, synthetic construct
  misc_feature 1..22: note = Synthetic
  source 1..22: mol_type = other DNA
caacaggattttgtgaccagcg

SEQ ID NO: 4883 - DNA, 22 bp, synthetic construct
  misc_feature 1..22: note = Synthetic
  source 1..22: mol_type = other DNA
ttcaagcaagtggcaagttcaa

SEQ ID NO: 4884 - DNA, 22 bp, synthetic construct
  misc_feature 1..22: note = Synthetic
  source 1..22: mol_type = other DNA
ctttgtagaccttttcaagcaa

SEQ ID NO: 4885 - DNA, 22 bp, synthetic construct
  misc_feature 1..22: note = Synthetic
  source 1..22: mol_type = other DNA
tcctaatacctgaatccaatga

SEQ ID NO: 4886 - DNA, 22 bp, synthetic construct
  misc_feature 1..22: note = Synthetic
  source 1..22: mol_type = other DNA
acactctttgcagatgttacat

SEQ ID NO: 4887 - DNA, 22 bp, synthetic construct
  misc_feature 1..22: note = Synthetic
  source 1..22: mol_type = other DNA
gatgttacatttggcctgatgc

SEQ ID NO: 4888 - DNA, 22 bp, synthetic construct
  misc_feature 1..22: note = Synthetic
  source 1..22: mol_type = other DNA
tttctgcagcagccactctgtg

SEQ ID NO: 4889 - DNA, 22 bp, synthetic construct
  misc_feature 1..22: note = Synthetic
  source 1..22: mol_type = other DNA
tgcagcagccactctgtgcagg

SEQ ID NO: 4890 - DNA, 22 bp, synthetic construct
  misc_feature 1..22: note = Synthetic
  source 1..22: mol_type = other DNA
gcagcagccactctgtgcagga

SEQ ID NO: 4891 - DNA, 22 bp, synthetic construct
  misc_feature 1..22: note = Synthetic
  source 1..22: mol_type = other DNA
gtgcaggacgggcagccacacc

SEQ ID NO: 4892 - DNA, 22 bp, synthetic construct
  misc_feature 1..22: note = Synthetic
  source 1..22: mol_type = other DNA
ggacgggcagccacaccatgga

SEQ ID NO: 4893 - DNA, 22 bp, synthetic construct
  misc_feature 1..22: note = Synthetic
  source 1..22: mol_type = other DNA
gacgggcagccacaccatggac

SEQ ID NO: 4894 - DNA, 22 bp, synthetic construct
  misc_feature 1..22: note = Synthetic
  source 1..22: mol_type = other DNA
acgggcagccacaccatggact

SEQ ID NO: 4895 - DNA, 22 bp, synthetic construct
  misc_feature 1..22: note = Synthetic
  source 1..22: mol_type = other DNA
ggggttccagtctcatccagtc

SEQ ID NO: 4896 - DNA, 22 bp, synthetic construct
  misc_feature 1..22: note = Synthetic
  source 1..22: mol_type = other DNA
ccagtctcatccagtctaggaa

SEQ ID NO: 4897 - DNA, 22 bp, synthetic construct
  misc_feature 1..22: note = Synthetic
  source 1..22: mol_type = other DNA
cagtctcatccagtctaggaag

SEQ ID NO: 4898 - DNA, 22 bp, synthetic construct
  misc_feature 1..22: note = Synthetic
  source 1..22: mol_type = other DNA
aggaagagggccgcttcgatct

SEQ ID NO: 4899 - DNA, 22 bp, synthetic construct
  misc_feature 1..22: note = Synthetic
  source 1..22: mol_type = other DNA
aagagtgtccaatcattggatt

SEQ ID NO: 4900 - DNA, 22 bp, synthetic construct
  misc_feature 1..22: note = Synthetic
  source 1..22: mol_type = other DNA
atctgcaaagagtgtccaatca

SEQ ID NO: 4901 - DNA, 22 bp, synthetic construct
  misc_feature 1..22: note = Synthetic
  source 1..22: mol_type = other DNA
tgctgcagaaactgccaagcat

SEQ ID NO: 4902 - DNA, 22 bp, synthetic construct
  misc_feature 1..22: note = Synthetic
  source 1..22: mol_type = other DNA
gtggctgcccgtcctgcacaga

SEQ ID NO: 4903 - DNA, 22 bp, synthetic construct
  misc_feature 1..22: note = Synthetic
  source 1..22: mol_type = other DNA
gactggaaccccagtccatggt

SEQ ID NO: 4904 - DNA, 22 bp, synthetic construct
  misc_feature 1..22: note = Synthetic
  source 1..22: mol_type = other DNA
gatgagactggaaccccagtcc

SEQ ID NO: 4905 - DNA, 22 bp, synthetic construct
  misc_feature 1..22: note = Synthetic
  source 1..22: mol_type = other DNA
cctcttcctagactggatgaga

SEQ ID NO: 4906 - DNA, 22 bp, synthetic construct
  misc_feature 1..22: note = Synthetic
  source 1..22: mol_type = other DNA
tcgaagcggccctcttcctaga

SEQ ID NO: 4907 - DNA, 22 bp, synthetic construct
  misc_feature 1..22: note = Synthetic
  source 1..22: mol_type = other DNA
taataataagccagagatcgaa

SEQ ID NO: 4908 - DNA, 22 bp, synthetic construct
  misc_feature 1..22: note = Synthetic
  source 1..22: mol_type = other DNA
taccggagtgcaatattccacc

SEQ ID NO: 4909 - DNA, 22 bp, synthetic construct
  misc_feature 1..22: note = Synthetic
  source 1..22: mol_type = other DNA
accggagtgcaatattccacca

SEQ ID NO: 4910 - DNA, 22 bp, synthetic construct
  misc_feature 1..22: note = Synthetic
  source 1..22: mol_type = other DNA
ccaccatgggatagtgcatttt

SEQ ID NO: 4911 - DNA, 22 bp, synthetic construct
  misc_feature 1..22: note = Synthetic
  source 1..22: mol_type = other DNA
ctcgaccagaaaaaaagcagct

SEQ ID NO: 4912 - DNA, 22 bp, synthetic construct
  misc_feature 1..22: note = Synthetic
  source 1..22: mol_type = other DNA
tcccatggtggaatattgcact

SEQ ID NO: 4913 - DNA, 22 bp, synthetic construct
  misc_feature 1..22: note = Synthetic
  source 1..22: mol_type = other DNA
ccataaaatgcactatcccatg

SEQ ID NO: 4914 - DNA, 22 bp, synthetic construct
  misc_feature 1..22: note = Synthetic
  source 1..22: mol_type = other DNA
aggccataaaatgcactatccc

SEQ ID NO: 4915 - DNA, 22 bp, synthetic construct
  misc_feature 1..22: note = Synthetic
  source 1..22: mol_type = other DNA
tttttttctggtcgagttgcaa

SEQ ID NO: 4916 - DNA, 22 bp, synthetic construct
  misc_feature 1..22: note = Synthetic
  source 1..22: mol_type = other DNA
atctgccaaagctgcttttttt

SEQ ID NO: 4917 - DNA, 22 bp, synthetic construct
  misc_feature 1..22: note = Synthetic
  source 1..22: mol_type = other DNA
tgtttttgctctttatcaggta

SEQ ID NO: 4918 - DNA, 22 bp, synthetic construct
  misc_feature 1..22: note = Synthetic
  source 1..22: mol_type = other DNA
tccccctctaagacagtctgca

SEQ ID NO: 4919 - DNA, 22 bp, synthetic construct
  misc_feature 1..22: note = Synthetic
  source 1..22: mol_type = other DNA
cctctaagacagtctgcactgg

SEQ ID NO: 4920 - DNA, 22 bp, synthetic construct
  misc_feature 1..22: note = Synthetic
  source 1..22: mol_type = other DNA
tctgcactggcaggtagcccat

SEQ ID NO: 4921 - DNA, 22 bp, synthetic construct
  misc_feature 1..22: note = Synthetic
  source 1..22: mol_type = other DNA
ctgcactggcaggtagcccatt

SEQ ID NO: 4922 - DNA, 22 bp, synthetic construct
  misc_feature 1..22: note = Synthetic
  source 1..22: mol_type = other DNA
tgcactggcaggtagcccattc

SEQ ID NO: 4923 - DNA, 22 bp, synthetic construct
  misc_feature 1..22: note = Synthetic
  source 1..22: mol_type = other DNA
gggatgcttcgcaaaatacctt

SEQ ID NO: 4924 - DNA, 22 bp, synthetic construct
  misc_feature 1..22: note = Synthetic
  source 1..22: mol_type = other DNA
tcgaaatttgttttttagtacc

SEQ ID NO: 4925 - DNA, 22 bp, synthetic construct
  misc_feature 1..22: note = Synthetic
  source 1..22: mol_type = other DNA
gactgtcttagagggggacaac

SEQ ID NO: 4926 - DNA, 22 bp, synthetic construct
  misc_feature 1..22: note = Synthetic
  source 1..22: mol_type = other DNA
gccagtgcagactgtcttagag

SEQ ID NO: 4927 - DNA, 22 bp, synthetic construct
  misc_feature 1..22: note = Synthetic
  source 1..22: mol_type = other DNA
tgccagtgcagactgtcttaga

SEQ ID NO: 4928 - DNA, 22 bp, synthetic construct
  misc_feature 1..22: note = Synthetic
  source 1..22: mol_type = other DNA
ctgccagtgcagactgtcttag

SEQ ID NO: 4929 - DNA, 22 bp, synthetic construct
  misc_feature 1..22: note = Synthetic
  source 1..22: mol_type = other DNA
cctgccagtgcagactgtctta

SEQ ID NO: 4930 - DNA, 22 bp, synthetic construct
  misc_feature 1..22: note = Synthetic
  source 1..22: mol_type = other DNA
tattttgcgaagcatccccgaa

SEQ ID NO: 4931 - DNA, 22 bp, synthetic construct
  misc_feature 1..22: note = Synthetic
  source 1..22: mol_type = other DNA
gtattttgcgaagcatccccga

SEQ ID NO: 4932 - DNA, 22 bp, synthetic construct
  misc_feature 1..22: note = Synthetic
  source 1..22: mol_type = other DNA
taaaaaacaaatttcgaaccaa

SEQ ID NO: 4933 - DNA, 22 bp, synthetic construct
  misc_feature 1..22: note = Synthetic
  source 1..22: mol_type = other DNA
agaagatgttcgagactttgcc

SEQ ID NO: 4934 - DNA, 22 bp, synthetic construct
  misc_feature 1..22: note = Synthetic
  source 1..22: mol_type = other DNA
tgatctcccttttagactacat

SEQ ID NO: 4935 - DNA, 22 bp, synthetic construct
  misc_feature 1..22: note = Synthetic
  source 1..22: mol_type = other DNA
aaaagtactcacgcagaatcta

SEQ ID NO: 4936 - DNA, 22 bp, synthetic construct
  misc_feature 1..22: note = Synthetic
  source 1..22: mol_type = other DNA
tggccagaagttgatcagagta

SEQ ID NO: 4937 - DNA, 22 bp, synthetic construct
  misc_feature 1..22: note = Synthetic
  source 1..22: mol_type = other DNA
ggccagaagttgatcagagtaa

SEQ ID NO: 4938 - DNA, 22 bp, synthetic construct
  misc_feature 1..22: note = Synthetic
  source 1..22: mol_type = other DNA
gtcccgttactctgatcaactt

SEQ ID NO: 4939 - DNA, 22 bp, synthetic construct
  misc_feature 1..22: note = Synthetic
  source 1..22: mol_type = other DNA
tgagtatcatcgtgtgaaagct

SEQ ID NO: 4940 - DNA, 22 bp, synthetic construct
  misc_feature 1..22: note = Synthetic
  source 1..22: mol_type = other DNA
gagtatcatcgtgtgaaagctg

SEQ ID NO: 4941 - DNA, 22 bp, synthetic construct
  misc_feature 1..22: note = Synthetic
  source 1..22: mol_type = other DNA
agtatcatcgtgtgaaagctga

SEQ ID NO: 4942 - DNA, 22 bp, synthetic construct
  misc_feature 1..22: note = Synthetic
  source 1..22: mol_type = other DNA
atcgtgtgaaagctgaggggac

SEQ ID NO: 4943 - DNA, 22 bp, synthetic construct
  misc_feature 1..22: note = Synthetic
  source 1..22: mol_type = other DNA
tgtgaaagctgaggggacgagg

SEQ ID NO: 4944 - DNA, 22 bp, synthetic construct
  misc_feature 1..22: note = Synthetic
  source 1..22: mol_type = other DNA
cacgcattgaacattatgctag

SEQ ID NO: 4945 - DNA, 22 bp, synthetic construct
  misc_feature 1..22: note = Synthetic
  source 1..22: mol_type = other DNA
tgggatacttacatgctctcat

SEQ ID NO: 4946 - DNA, 22 bp, synthetic construct
  misc_feature 1..22: note = Synthetic
  source 1..22: mol_type = other DNA
ctagcagaaatggaaaacagca

SEQ ID NO: 4947 - DNA, 22 bp, synthetic construct
  misc_feature 1..22: note = Synthetic
  source 1..22: mol_type = other DNA
gttttttatcaggctagcagaa

SEQ ID NO: 4948 - DNA, 22 bp, synthetic construct
  misc_feature 1..22: note = Synthetic
  source 1..22: mol_type = other DNA
tgttttcttcctcaagatctgc

SEQ ID NO: 4949 - DNA, 22 bp, synthetic construct
  misc_feature 1..22: note = Synthetic
  source 1..22: mol_type = other DNA
ctcccctctttcctcactctct

SEQ ID NO: 4950 - DNA, 22 bp, synthetic construct
  misc_feature 1..22: note = Synthetic
  source 1..22: mol_type = other DNA
cactctctaaggaaatcaagat

SEQ ID NO: 4951 - DNA, 22 bp, synthetic construct
  misc_feature 1..22: note = Synthetic
  source 1..22: mol_type = other DNA
actctctaaggaaatcaagatc

SEQ ID NO: 4952 - DNA, 22 bp, synthetic construct
  misc_feature 1..22: note = Synthetic
  source 1..22: mol_type = other DNA
tctaaggaaatcaagatctggg

SEQ ID NO: 4953 - DNA, 22 bp, synthetic construct
  misc_feature 1..22: note = Synthetic
  source 1..22: mol_type = other DNA
atcaagatctgggcaggactac

SEQ ID NO: 4954 - DNA, 22 bp, synthetic construct
  misc_feature 1..22: note = Synthetic
  source 1..22: mol_type = other DNA
agatctgggcaggactacgagg

SEQ ID NO: 4955 - DNA, 22 bp, synthetic construct
  misc_feature 1..22: note = Synthetic
  source 1..22: mol_type = other DNA
gggcaggactacgaggctggct

SEQ ID NO: 4956 - DNA, 22 bp, synthetic construct
  misc_feature 1..22: note = Synthetic
  source 1..22: mol_type = other DNA
ggcaggactacgaggctggctc

SEQ ID NO: 4957 - DNA, 22 bp, synthetic construct
  misc_feature 1..22: note = Synthetic
  source 1..22: mol_type = other DNA
gcaggactacgaggctggctca

SEQ ID NO: 4958 - DNA, 22 bp, synthetic construct
  misc_feature 1..22: note = Synthetic
  source 1..22: mol_type = other DNA
caggactacgaggctggctcag

SEQ ID NO: 4959 - DNA, 22 bp, synthetic construct
  misc_feature 1..22: note = Synthetic
  source 1..22: mol_type = other DNA
aggactacgaggctggctcagg

SEQ ID NO: 4960 - DNA, 22 bp, synthetic construct
  misc_feature 1..22: note = Synthetic
  source 1..22: mol_type = other DNA
gaggctggctcaggggggagtc

SEQ ID NO: 4961 - DNA, 22 bp, synthetic construct
  misc_feature 1..22: note = Synthetic
  source 1..22: mol_type = other DNA
ggggggagtcctggttcaaact

SEQ ID NO: 4962 - DNA, 22 bp, synthetic construct
  misc_feature 1..22: note = Synthetic
  source 1..22: mol_type = other DNA
ggttcaaactttggcagtaatg

SEQ ID NO: 4963 - DNA, 22 bp, synthetic construct
  misc_feature 1..22: note = Synthetic
  source 1..22: mol_type = other DNA
gattaacaaatgttcatcatct

SEQ ID NO: 4964 - DNA, 22 bp, synthetic construct
  misc_feature 1..22: note = Synthetic
  source 1..22: mol_type = other DNA
tagcagatcttgaggaagaaaa

SEQ ID NO: 4965 - DNA, 22 bp, synthetic construct
  misc_feature 1..22: note = Synthetic
  source 1..22: mol_type = other DNA
agagagaatcctagcagatctt

SEQ ID NO: 4966 - DNA, 22 bp, synthetic construct
  misc_feature 1..22: note = Synthetic
  source 1..22: mol_type = other DNA
ttccttagagagtgaggaaaga

SEQ ID NO: 4967 - DNA, 22 bp, synthetic construct
  misc_feature 1..22: note = Synthetic
  source 1..22: mol_type = other DNA
tttccttagagagtgaggaaag

SEQ ID NO: 4968 - DNA, 22 bp, synthetic construct
  misc_feature 1..22: note = Synthetic
  source 1..22: mol_type = other DNA
atttccttagagagtgaggaaa

SEQ ID NO: 4969 - DNA, 22 bp, synthetic construct
  misc_feature 1..22: note = Synthetic
  source 1..22: mol_type = other DNA
gatcttgatttccttagagagt

SEQ ID NO: 4970 - DNA, 22 bp, synthetic construct
  misc_feature 1..22: note = Synthetic
  source 1..22: mol_type = other DNA
gcattactgccaaagtttgaac

SEQ ID NO: 4971 - DNA, 22 bp, synthetic construct
  misc_feature 1..22: note = Synthetic
  source 1..22: mol_type = other DNA
actgtgactccagctgtttatt

SEQ ID NO: 4972 - DNA, 22 bp, synthetic construct
  misc_feature 1..22: note = Synthetic
  source 1..22: mol_type = other DNA
ccagctgtttattgtggtcttc

SEQ ID NO: 4973 - DNA, 22 bp, synthetic construct
  misc_feature 1..22: note = Synthetic
  source 1..22: mol_type = other DNA
gtggtcttccaggatttgcatc

SEQ ID NO: 4974 - DNA, 22 bp, synthetic construct
  misc_feature 1..22: note = Synthetic
  source 1..22: mol_type = other DNA
ccaggatttgcatcctggcttc

SEQ ID NO: 4975 - DNA, 22 bp, synthetic construct
  misc_feature 1..22: note = Synthetic
  source 1..22: mol_type = other DNA
ggatttgcatcctggcttccag

SEQ ID NO: 4976 - DNA, 22 bp, synthetic construct
  misc_feature 1..22: note = Synthetic
  source 1..22: mol_type = other DNA
gcctttgtgttgacgcagtagc

SEQ ID NO: 4977 - DNA, 22 bp, synthetic construct
  misc_feature 1..22: note = Synthetic
  source 1..22: mol_type = other DNA
cctcagcaatgagctcagcatc

SEQ ID NO: 4978 - DNA, 22 bp, synthetic construct
  misc_feature 1..22: note = Synthetic
  source 1..22: mol_type = other DNA
ctcagcaatgagctcagcatcc

SEQ ID NO: 4979 - DNA, 22 bp, synthetic construct
  misc_feature 1..22: note = Synthetic
  source 1..22: mol_type = other DNA
tcagcaatgagctcagcatccc

SEQ ID NO: 4980 - DNA, 22 bp, synthetic construct
  misc_feature 1..22: note = Synthetic
  source 1..22: mol_type = other DNA
tgagctcagcatcccggggact

SEQ ID NO: 4981 - DNA, 22 bp, synthetic construct
  misc_feature 1..22: note = Synthetic
  source 1..22: mol_type = other DNA
gagctcagcatcccggggactc

SEQ ID NO: 4982 - DNA, 22 bp, synthetic construct
  misc_feature 1..22: note = Synthetic
  source 1..22: mol_type = other DNA
agctcagcatcccggggactct

SEQ ID NO: 4983 - DNA, 22 bp, synthetic construct
  misc_feature 1..22: note = Synthetic
  source 1..22: mol_type = other DNA
agcatcccggggactctgggga

SEQ ID NO: 4984 - DNA, 22 bp, synthetic construct
  misc_feature 1..22: note = Synthetic
  source 1..22: mol_type = other DNA
atcccggggactctggggagag

SEQ ID NO: 4985 - DNA, 22 bp, synthetic construct
  misc_feature 1..22: note = Synthetic
  source 1..22: mol_type = other DNA
tcccggggactctggggagagg

SEQ ID NO: 4986 - DNA, 22 bp, synthetic construct
  misc_feature 1..22: note = Synthetic
  source 1..22: mol_type = other DNA
tggggagaggtgggcatcattt

SEQ ID NO: 4987 - DNA, 22 bp, synthetic construct
  misc_feature 1..22: note = Synthetic
  source 1..22: mol_type = other DNA
ggagaggtgggcatcatttcag

SEQ ID NO: 4988 - DNA, 22 bp, synthetic construct
  misc_feature 1..22: note = Synthetic
  source 1..22: mol_type = other DNA
gagaggtgggcatcatttcagg

SEQ ID NO: 4989 - DNA, 22 bp, synthetic construct
  misc_feature 1..22: note = Synthetic
  source 1..22: mol_type = other DNA
agaggtgggcatcatttcagga

SEQ ID NO: 4990 - DNA, 22 bp, synthetic construct
  misc_feature 1..22: note = Synthetic
  source 1..22: mol_type = other DNA
gtgggcatcatttcaggagggg

SEQ ID NO: 4991 - DNA, 22 bp, synthetic construct
  misc_feature 1..22: note = Synthetic
  source 1..22: mol_type = other DNA
atcatttcaggaggggacggca

SEQ ID NO: 4992 - DNA, 22 bp, synthetic construct
  misc_feature 1..22: note = Synthetic
  source 1..22: mol_type = other DNA
tcatttcaggaggggacggcag

SEQ ID NO: 4993 - DNA, 22 bp, synthetic construct
  misc_feature 1..22: note = Synthetic
  source 1..22: mol_type = other DNA
catttcaggaggggacggcagt

SEQ ID NO: 4994 - DNA, 22 bp, synthetic construct
  misc_feature 1..22: note = Synthetic
  source 1..22: mol_type = other DNA
caggaggggacggcagtgggga

SEQ ID NO: 4995 - DNA, 22 bp, synthetic construct
  misc_feature 1..22: note = Synthetic
  source 1..22: mol_type = other DNA
tatgttcgtgctgctgctttag

SEQ ID NO: 4996 - DNA, 22 bp, synthetic construct
  misc_feature 1..22: note = Synthetic
  source 1..22: mol_type = other DNA
atattctgcttgcagattccta

SEQ ID NO: 4997 - DNA, 22 bp, synthetic construct
  misc_feature 1..22: note = Synthetic
  source 1..22: mol_type = other DNA
taaggcagctgctggagcaagt

SEQ ID NO: 4998 - DNA, 22 bp, synthetic construct
  misc_feature 1..22: note = Synthetic
  source 1..22: mol_type = other DNA
gttacacaggctaaggcagctg

SEQ ID NO: 4999 - DNA, 22 bp, synthetic construct
  misc_feature 1..22: note = Synthetic
  source 1..22: mol_type = other DNA
tggagtcacagttacacaggct

SEQ ID NO: 5000 - DNA, 22 bp, synthetic construct
  misc_feature 1..22: note = Synthetic
  source 1..22: mol_type = other DNA
aacagctggagtcacagttaca

SEQ ID NO: 5001 - DNA, 22 bp, synthetic construct
  misc_feature 1..22: note = Synthetic
  source 1..22: mol_type = other DNA
cctggaagaccacaataaacag

SEQ ID NO: 5002 - DNA, 22 bp, synthetic construct
  misc_feature 1..22: note = Synthetic
  source 1..22: mol_type = other DNA
cctggaagccaggatgcaaatc

SEQ ID NO: 5003 - DNA, 22 bp, synthetic construct
  misc_feature 1..22: note = Synthetic
  source 1..22: mol_type = other DNA
aacacaaaggccgcctggaagc

SEQ ID NO: 5004 - DNA, 22 bp, synthetic construct
  misc_feature 1..22: note = Synthetic
  source 1..22: mol_type = other DNA
actgcgtcaacacaaaggccgc

SEQ ID NO: 5005 - DNA, 22 bp, synthetic construct
  misc_feature 1..22: note = Synthetic
  source 1..22: mol_type = other DNA
gccaagctactgcgtcaacaca

SEQ ID NO: 5006 - DNA, 22 bp, synthetic construct
  misc_feature 1..22: note = Synthetic
  source 1..22: mol_type = other DNA
ccgggatgctgagctcattgct

SEQ ID NO: 5007 - DNA, 22 bp, synthetic construct
  misc_feature 1..22: note = Synthetic
  source 1..22: mol_type = other DNA
gcccacctctccccagagtccc

SEQ ID NO: 5008 - DNA, 22 bp, synthetic construct
  misc_feature 1..22: note = Synthetic
  source 1..22: mol_type = other DNA
tgcccacctctccccagagtcc

SEQ ID NO: 5009 - DNA, 22 bp, synthetic construct
  misc_feature 1..22: note = Synthetic
  source 1..22: mol_type = other DNA
ctaaagcagcagcacgaacata

SEQ ID NO: 5010 - DNA, 22 bp, synthetic construct
  misc_feature 1..22: note = Synthetic
  source 1..22: mol_type = other DNA
ccgaagtttgactgccaaccac

SEQ ID NO: 5011 - DNA, 22 bp, synthetic construct
  misc_feature 1..22: note = Synthetic
  source 1..22: mol_type = other DNA
ctgccaaccactcggagcagca

SEQ ID NO: 5012 - DNA, 22 bp, synthetic construct
  misc_feature 1..22: note = Synthetic
  source 1..22: mol_type = other DNA
gagcagcataggctgactgctg

SEQ ID NO: 5013 - DNA, 22 bp, synthetic construct
  misc_feature 1..22: note = Synthetic
  source 1..22: mol_type = other DNA
actgctgtcggacctctgtaga

SEQ ID NO: 5014 - DNA, 22 bp, synthetic construct
  misc_feature 1..22: note = Synthetic
  source 1..22: mol_type = other DNA
tcggacctctgtagagaggtag

SEQ ID NO: 5015 - DNA, 22 bp, synthetic construct
  misc_feature 1..22: note = Synthetic
  source 1..22: mol_type = other DNA
cctctgtagagaggtagaagga

SEQ ID NO: 5016 - DNA, 22 bp, synthetic construct
  misc_feature 1..22: note = Synthetic
  source 1..22: mol_type = other DNA
ggacaccgttgtgccattcact

SEQ ID NO: 5017 - DNA, 22 bp, synthetic construct
  misc_feature 1..22: note = Synthetic
  source 1..22: mol_type = other DNA
tgccattcactttggcctctgc

SEQ ID NO: 5018 - DNA, 22 bp, synthetic construct
  misc_feature 1..22: note = Synthetic
  source 1..22: mol_type = other DNA
gccattcactttggcctctgcc

SEQ ID NO: 5019 - DNA, 22 bp, synthetic construct
  misc_feature 1..22: note = Synthetic
  source 1..22: mol_type = other DNA
ccattcactttggcctctgcct

SEQ ID NO: 5020 - DNA, 22 bp, synthetic construct
  misc_feature 1..22: note = Synthetic
  source 1..22: mol_type = other DNA
ggcagtcaaacttcggactcca

SEQ ID NO: 5021 - DNA, 22 bp, synthetic construct
  misc_feature 1..22: note = Synthetic
  source 1..22: mol_type = other DNA
tggcagtcaaacttcggactcc

SEQ ID NO: 5022 - DNA, 22 bp, synthetic construct
  misc_feature 1..22: note = Synthetic
  source 1..22: mol_type = other DNA
ccgagtggttggcagtcaaact

SEQ ID NO: 5023 - DNA, 22 bp, synthetic construct
  misc_feature 1..22: note = Synthetic
  source 1..22: mol_type = other DNA
cagcctatgctgctccgagtgg

SEQ ID NO: 5024 - DNA, 22 bp, synthetic construct
  misc_feature 1..22: note = Synthetic
  source 1..22: mol_type = other DNA
cagtcagcctatgctgctccga

SEQ ID NO: 5025 - DNA, 22 bp, synthetic construct
  misc_feature 1..22: note = Synthetic
  source 1..22: mol_type = other DNA
cctctccttctacctctctaca

SEQ ID NO: 5026 - DNA, 22 bp, synthetic construct
  misc_feature 1..22: note = Synthetic
  source 1..22: mol_type = other DNA
agaggccaaagtgaatggcaca

SEQ ID NO: 5027 - DNA, 22 bp, synthetic construct
  misc_feature 1..22: note = Synthetic
  source 1..22: mol_type = other DNA
ccccaggcagaggccaaagtga

SEQ ID NO: 5028 - DNA, 22 bp, synthetic construct
  misc_feature 1..22: note = Synthetic
  source 1..22: mol_type = other DNA
ttggatgacttagccccaggca

SEQ ID NO: 5029 - DNA, 22 bp, synthetic construct
  misc_feature 1..22: note = Synthetic
  source 1..22: mol_type = other DNA
tttcttttggatgacttagccc

SEQ ID NO: 5030 - DNA, 22 bp, synthetic construct
  misc_feature 1..22: note = Synthetic
  source 1..22: mol_type = other DNA
tattggagcttacctcttgaac

SEQ ID NO: 5031 - DNA, 22 bp, synthetic construct
  misc_feature 1..22: note = Synthetic
  source 1..22: mol_type = other DNA
attggagcttacctcttgaact

SEQ ID NO: 5032 - DNA, 22 bp, synthetic construct
  misc_feature 1..22: note = Synthetic
  source 1..22: mol_type = other DNA
gagcttacctcttgaactaggg

SEQ ID NO: 5033 - DNA, 22 bp, synthetic construct
  misc_feature 1..22: note = Synthetic
  source 1..22: mol_type = other DNA
cctctaaccctgtgcttgtgtc

SEQ ID NO: 5034 - DNA, 22 bp, synthetic construct
  misc_feature 1..22: note = Synthetic
  source 1..22: mol_type = other DNA
ctctaaccctgtgcttgtgtcc

SEQ ID NO: 5035 - DNA, 22 bp, synthetic construct
  misc_feature 1..22: note = Synthetic
  source 1..22: mol_type = other DNA
tctaaccctgtgcttgtgtcct

SEQ ID NO: 5036 - DNA, 22 bp, synthetic construct
  misc_feature 1..22: note = Synthetic
  source 1..22: mol_type = other DNA
aaccctgtgcttgtgtcctggg

SEQ ID NO: 5037 - DNA, 22 bp, synthetic construct
  misc_feature 1..22: note = Synthetic
  source 1..22: mol_type = other DNA
aacaactccttccctagttcaa

SEQ ID NO: 5038 - DNA, 22 bp, synthetic construct
  misc_feature 1..22: note = Synthetic
  source 1..22: mol_type = other DNA
aagcacagggttagaggaggtg

SEQ ID NO: 5039 - DNA, 22 bp, synthetic construct
  misc_feature 1..22: note = Synthetic
  source 1..22: mol_type = other DNA
ggacacaagcacagggttagag

SEQ ID NO: 5040 - DNA, 22 bp, synthetic construct
  misc_feature 1..22: note = Synthetic
  source 1..22: mol_type = other DNA
ccaggacacaagcacagggtta

SEQ ID NO: 5041 - DNA, 22 bp, synthetic construct
  misc_feature 1..22: note = Synthetic
  source 1..22: mol_type = other DNA
gtcctccccaggacacaagcac

SEQ ID NO: 5042 - DNA, 22 bp, synthetic construct
  misc_feature 1..22: note = Synthetic
  source 1..22: mol_type = other DNA
agtcctccccaggacacaagca

SEQ ID NO: 5043 - DNA, 22 bp, synthetic construct
  misc_feature 1..22: note = Synthetic
  source 1..22: mol_type = other DNA
ggaagatcttctcagtcctccc

SEQ ID NO: 5044 - DNA, 22 bp, synthetic construct
  misc_feature 1..22: note = Synthetic
  source 1..22: mol_type = other DNA
tgaatctcactaacctctctca

SEQ ID NO: 5045 - DNA, 22 bp, synthetic construct
  misc_feature 1..22: note = Synthetic
  source 1..22: mol_type = other DNA
ctaacctctctcattggctttc

SEQ ID NO: 5046 - DNA, 22 bp, synthetic construct
  misc_feature 1..22: note = Synthetic
  source 1..22: mol_type = other DNA
taacctctctcattggctttcc

SEQ ID NO: 5047 - DNA, 22 bp, synthetic construct
  misc_feature 1..22: note = Synthetic
  source 1..22: mol_type = other DNA
aacctctctcattggctttcca

SEQ ID NO: 5048 - DNA, 22 bp, synthetic construct
  misc_feature 1..22: note = Synthetic
  source 1..22: mol_type = other DNA
tacccctggaaagccaatgaga

SEQ ID NO: 5049 - DNA, 22 bp, synthetic construct
  misc_feature 1..22: note = Synthetic
  source 1..22: mol_type = other DNA
attattaaaggaagaaataccc

SEQ ID NO: 5050 - DNA, 22 bp, synthetic construct
  misc_feature 1..22: note = Synthetic
  source 1..22: mol_type = other DNA
agcagtactataatacaatagt

SEQ ID NO: 5051 - DNA, 22 bp, synthetic construct
  misc_feature 1..22: note = Synthetic
  source 1..22: mol_type = other DNA
aatacaatagtaaggcatatat

SEQ ID NO: 5052 - DNA, 22 bp, synthetic construct
  misc_feature 1..22: note = Synthetic
  source 1..22: mol_type = other DNA
ataattcgtaaatgttacagtg

SEQ ID NO: 5053 - DNA, 22 bp, synthetic construct
  misc_feature 1..22: note = Synthetic
  source 1..22: mol_type = other DNA
attatgatttacagtttaatac

SEQ ID NO: 5054 - DNA, 22 bp, synthetic construct
  misc_feature 1..22: note = Synthetic
  source 1..22: mol_type = other DNA
atgatttacagtttaatacttg

SEQ ID NO: 5055 - DNA, 22 bp, synthetic construct
  misc_feature 1..22: note = Synthetic
  source 1..22: mol_type = other DNA
cttacttacttaaacttcttag

SEQ ID NO: 5056 - DNA, 22 bp, synthetic construct
  misc_feature 1..22: note = Synthetic
  source 1..22: mol_type = other DNA
taaatctgagttttaaaaatcc

SEQ ID NO: 5057 - DNA, 22 bp, synthetic construct
  misc_feature 1..22: note = Synthetic
  source 1..22: mol_type = other DNA
aaatctgagttttaaaaatcct

SEQ ID NO: 5058 - DNA, 22 bp, synthetic construct
  misc_feature 1..22: note = Synthetic
  source 1..22: mol_type = other DNA
ttaaaaatccttgggtaaagaa

SEQ ID NO: 5059 - DNA, 22 bp, synthetic construct
  misc_feature 1..22: note = Synthetic
  source 1..22: mol_type = other DNA
agaaaaggtccagcgtcacata

SEQ ID NO: 5060 - DNA, 22 bp, synthetic construct
  misc_feature 1..22: note = Synthetic
  source 1..22: mol_type = other DNA
aaaaaccaaatcttcatgtaat

SEQ ID NO: 5061 - DNA, 22 bp, synthetic construct
  misc_feature 1..22: note = Synthetic
  source 1..22: mol_type = other DNA
ggtaatttgttaccttagagct

SEQ ID NO: 5062 - DNA, 22 bp, synthetic construct
  misc_feature 1..22: note = Synthetic
  source 1..22: mol_type = other DNA
gtaatttgttaccttagagctt

SEQ ID NO: 5063 - DNA, 22 bp, synthetic construct
  misc_feature 1..22: note = Synthetic
  source 1..22: mol_type = other DNA
gggttttcttttgaaaattatg

SEQ ID NO: 5064 - DNA, 22 bp, synthetic construct
  misc_feature 1..22: note = Synthetic
  source 1..22: mol_type = other DNA
gaaggaaaaagaaagaattata

SEQ ID NO: 5065 - DNA, 22 bp, synthetic construct
  misc_feature 1..22: note = Synthetic
  source 1..22: mol_type = other DNA
aaaggaaaaagaaaataacgca

SEQ ID NO: 5066 - DNA, 22 bp, synthetic construct
  misc_feature 1..22: note = Synthetic
  source 1..22: mol_type = other DNA
aagaaaataacgcaatggacaa

SEQ ID NO: 5067 - DNA, 22 bp, synthetic construct
  misc_feature 1..22: note = Synthetic
  source 1..22: mol_type = other DNA
acaagtggtgaagctgtgaact

SEQ ID NO: 5068 - DNA, 22 bp, synthetic construct
  misc_feature 1..22: note = Synthetic
  source 1..22: mol_type = other DNA
gaactcaggtgtgcacaattat

SEQ ID NO: 5069 - DNA, 22 bp, synthetic construct
  misc_feature 1..22: note = Synthetic
  source 1..22: mol_type = other DNA
aggaacaccccaaaaccaaagt

SEQ ID NO: 5070 - DNA, 22 bp, synthetic construct
  misc_feature 1..22: note = Synthetic
  source 1..22: mol_type = other DNA
gttaattaattaattattaata

SEQ ID NO: 5071 - DNA, 22 bp, synthetic construct
  misc_feature 1..22: note = Synthetic
  source 1..22: mol_type = other DNA
aagctaattacacttgatgtca

SEQ ID NO: 5072 - DNA, 22 bp, synthetic construct
  misc_feature 1..22: note = Synthetic
  source 1..22: mol_type = other DNA
aggtaacagatttgcaaaatta

SEQ ID NO: 5073 - DNA, 22 bp, synthetic construct
  misc_feature 1..22: note = Synthetic
  source 1..22: mol_type = other DNA
gatttgcaaaattataggtcac

SEQ ID NO: 5074 - DNA, 22 bp, synthetic construct
  misc_feature 1..22: note = Synthetic
  source 1..22: mol_type = other DNA
ttgcaaaattataggtcacacg

SEQ ID NO: 5075 - DNA, 22 bp, synthetic construct
  misc_feature 1..22: note = Synthetic
  source 1..22: mol_type = other DNA
ttaaaaatcaaaaagaaataaa

SEQ ID NO: 5076 - DNA, 22 bp, synthetic construct
  misc_feature 1..22: note = Synthetic
  source 1..22: mol_type = other DNA
ttaacctgtctaatccaccaag

SEQ ID NO: 5077 - DNA, 22 bp, synthetic construct
  misc_feature 1..22: note = Synthetic
  source 1..22: mol_type = other DNA
taacctgtctaatccaccaaga

SEQ ID NO: 5078 - DNA, 22 bp, synthetic construct
  misc_feature 1..22: note = Synthetic
  source 1..22: mol_type = other DNA
tcttacttacttacaaacctgt

SEQ ID NO: 5079 - DNA, 22 bp, synthetic construct
  misc_feature 1..22: note = Synthetic
  source 1..22: mol_type = other DNA
gaactactcgcagagaaatgca

SEQ ID NO: 5080 - DNA, 22 bp, synthetic construct
  misc_feature 1..22: note = Synthetic
  source 1..22: mol_type = other DNA
tactcgcagagaaatgcaaagg

SEQ ID NO: 5081 - DNA, 22 bp, synthetic construct
  misc_feature 1..22: note = Synthetic
  source 1..22: mol_type = other DNA
gcaaaggatggaaacacagttc

SEQ ID NO: 5082 - DNA, 22 bp, synthetic construct
  misc_feature 1..22: note = Synthetic
  source 1..22: mol_type = other DNA
caaaggatggaaacacagttca

SEQ ID NO: 5083 - DNA, 22 bp, synthetic construct
  misc_feature 1..22: note = Synthetic
  source 1..22: mol_type = other DNA
tggaaacacagttcatgggctt

SEQ ID NO: 5084 - DNA, 22 bp, synthetic construct
  misc_feature 1..22: note = Synthetic
  source 1..22: mol_type = other DNA
ggaaacacagttcatgggcttc

SEQ ID NO: 5085 - DNA, 22 bp, synthetic construct
  misc_feature 1..22: note = Synthetic
  source 1..22: mol_type = other DNA
acctgtcagtatcacaaatgtg

SEQ ID NO: 5086 - DNA, 22 bp, synthetic construct
  misc_feature 1..22: note = Synthetic
  source 1..22: mol_type = other DNA
cctgtcagtatcacaaatgtga

SEQ ID NO: 5087 - DNA, 22 bp, synthetic construct
  misc_feature 1..22: note = Synthetic
  source 1..22: mol_type = other DNA
ctgtcagtatcacaaatgtgat

SEQ ID NO: 5088 - DNA, 22 bp, synthetic construct
  misc_feature 1..22: note = Synthetic
  source 1..22: mol_type = other DNA
tatttattttaaattatgtctt

SEQ ID NO: 5089 - DNA, 22 bp, synthetic construct
  misc_feature 1..22: note = Synthetic
  source 1..22: mol_type = other DNA
ggcatttaaaaactcatcccac

SEQ ID NO: 5090 - DNA, 22 bp, synthetic construct
  misc_feature 1..22: note = Synthetic
  source 1..22: mol_type = other DNA
gcatttaaaaactcatcccaca

SEQ ID NO: 5091 - DNA, 22 bp, synthetic construct
  misc_feature 1..22: note = Synthetic
  source 1..22: mol_type = other DNA
cagttccttttgactgtgagaa

SEQ ID NO: 5092 - DNA, 22 bp, synthetic construct
  misc_feature 1..22: note = Synthetic
  source 1..22: mol_type = other DNA
agttccttttgactgtgagaag

SEQ ID NO: 5093 - DNA, 22 bp, synthetic construct
  misc_feature 1..22: note = Synthetic
  source 1..22: mol_type = other DNA
catccaatccttcacttaaaga

SEQ ID NO: 5094 - DNA, 22 bp, synthetic construct
  misc_feature 1..22: note = Synthetic
  source 1..22: mol_type = other DNA
taaagagtggcctactccttca

SEQ ID NO: 5095 - DNA, 22 bp, synthetic construct
  misc_feature 1..22: note = Synthetic
  source 1..22: mol_type = other DNA
aaagagtggcctactccttcac

SEQ ID NO: 5096 - DNA, 22 bp, synthetic construct
  misc_feature 1..22: note = Synthetic
  source 1..22: mol_type = other DNA
agtggcctactccttcacaggg

SEQ ID NO: 5097 - DNA, 22 bp, synthetic construct
  misc_feature 1..22: note = Synthetic
  source 1..22: mol_type = other DNA
gtggcctactccttcacaggga

SEQ ID NO: 5098 - DNA, 22 bp, synthetic construct
  misc_feature 1..22: note = Synthetic
  source 1..22: mol_type = other DNA
cctactccttcacagggatggg

SEQ ID NO: 5099 - DNA, 22 bp, synthetic construct
  misc_feature 1..22: note = Synthetic
  source 1..22: mol_type = other DNA
ctactccttcacagggatgggc

SEQ ID NO: 5100 - DNA, 22 bp, synthetic construct
  misc_feature 1..22: note = Synthetic
  source 1..22: mol_type = other DNA
cctatcatcgtcctgctactgc

SEQ ID NO: 5101 - DNA, 22 bp, synthetic construct
  misc_feature 1..22: note = Synthetic
  source 1..22: mol_type = other DNA
ctatcatcgtcctgctactgct

SEQ ID NO: 5102 - DNA, 22 bp, synthetic construct
  misc_feature 1..22: note = Synthetic
  source 1..22: mol_type = other DNA
aaaaataccttctgatgttcac

SEQ ID NO: 5103 - DNA, 22 bp, synthetic construct
  misc_feature 1..22: note = Synthetic
  source 1..22: mol_type = other DNA
gaagcatcattaaatctaaatc

SEQ ID NO: 5104 - DNA, 22 bp, synthetic construct
  misc_feature 1..22: note = Synthetic
  source 1..22: mol_type = other DNA
taaatcgtggcattgctagcag

SEQ ID NO: 5105 - DNA, 22 bp, synthetic construct
  misc_feature 1..22: note = Synthetic
  source 1..22: mol_type = other DNA
ctttactttactttcgttgtca

SEQ ID NO: 5106 - DNA, 22 bp, synthetic construct
  misc_feature 1..22: note = Synthetic
  source 1..22: mol_type = other DNA
agttgtttaaaatgagaaacat

SEQ ID NO: 5107 - DNA, 22 bp, synthetic construct
  misc_feature 1..22: note = Synthetic
  source 1..22: mol_type = other DNA
gagctgtagacaatgttttagt

SEQ ID NO: 5108 - DNA, 22 bp, synthetic construct
  misc_feature 1..22: note = Synthetic
  source 1..22: mol_type = other DNA
tttagtgtggtgtagtttcctc

SEQ ID NO: 5109 - DNA, 22 bp, synthetic construct
  misc_feature 1..22: note = Synthetic
  source 1..22: mol_type = other DNA
tggtgtagtttcctcctggctt

SEQ ID NO: 5110 - DNA, 22 bp, synthetic construct
  misc_feature 1..22: note = Synthetic
  source 1..22: mol_type = other DNA
agtttcctcctggcttccggct

SEQ ID NO: 5111 - DNA, 22 bp, synthetic construct
  misc_feature 1..22: note = Synthetic
  source 1..22: mol_type = other DNA
gtttcctcctggcttccggctc

SEQ ID NO: 5112 - DNA, 22 bp, synthetic construct
  misc_feature 1..22: note = Synthetic
  source 1..22: mol_type = other DNA
gaaaaatccattctagaccaag

SEQ ID NO: 5113 - DNA, 22 bp, synthetic construct
  misc_feature 1..22: note = Synthetic
  source 1..22: mol_type = other DNA
attctagaccaagcaggtaagc

SEQ ID NO: 5114 - DNA, 22 bp, synthetic construct
  misc_feature 1..22: note = Synthetic
  source 1..22: mol_type = other DNA
actagaagtaatttctttctat

SEQ ID NO: 5115 - DNA, 22 bp, synthetic construct
  misc_feature 1..22: note = Synthetic
  source 1..22: mol_type = other DNA
atgtgacatgaacatttaaaaa

SEQ ID NO: 5116 - DNA, 22 bp, synthetic construct
  misc_feature 1..22: note = Synthetic
  source 1..22: mol_type = other DNA
atgagcagtgtgtagtagtcat

SEQ ID NO: 5117 - DNA, 22 bp, synthetic construct
  misc_feature 1..22: note = Synthetic
  source 1..22: mol_type = other DNA
cagtgtgtagtagtcatttggt

SEQ ID NO: 5118 - DNA, 22 bp, synthetic construct
  misc_feature 1..22: note = Synthetic
  source 1..22: mol_type = other DNA
tgtgtagtagtcatttggtgtg

SEQ ID NO: 5119 - DNA, 22 bp, synthetic construct
  misc_feature 1..22: note = Synthetic
  source 1..22: mol_type = other DNA
gtagtcatttggtgtggtggta

SEQ ID NO: 5120 - DNA, 22 bp, synthetic construct
  misc_feature 1..22: note = Synthetic
  source 1..22: mol_type = other DNA
aagaaaaagccatgaatttcat

SEQ ID NO: 5121 - DNA, 22 bp, synthetic construct
  misc_feature 1..22: note = Synthetic
  source 1..22: mol_type = other DNA
tttcatatggatatcacgccaa

SEQ ID NO: 5122 - DNA, 22 bp, synthetic construct
  misc_feature 1..22: note = Synthetic
  source 1..22: mol_type = other DNA
gtgtgtgtgtttgttttgtttt

SEQ ID NO: 5123 - DNA, 22 bp, synthetic construct
  misc_feature 1..22: note = Synthetic
  source 1..22: mol_type = other DNA
tgtgtgtgtttgttttgttttt

SEQ ID NO: 5124 - DNA, 22 bp, synthetic construct
  misc_feature 1..22: note = Synthetic
  source 1..22: mol_type = other DNA
gtgtgtgtttgttttgttttta

SEQ ID NO: 5125 - DNA, 22 bp, synthetic construct
  misc_feature 1..22: note = Synthetic
  source 1..22: mol_type = other DNA
aaaatgcgttccatataaagaa

SEQ ID NO: 5126 - DNA, 22 bp, synthetic construct
  misc_feature 1..22: note = Synthetic
  source 1..22: mol_type = other DNA
gtatgaatattataaaaaccat

SEQ ID NO: 5127 - DNA, 22 bp, synthetic construct
  misc_feature 1..22: note = Synthetic
  source 1..22: mol_type = other DNA
tatgaatattataaaaaccatg

SEQ ID NO: 5128 - DNA, 22 bp, synthetic construct
  misc_feature 1..22: note = Synthetic
  source 1..22: mol_type = other DNA
attataaaaaccatgcgggaat

SEQ ID NO: 5129 - DNA, 22 bp, synthetic construct
  misc_feature 1..22: note = Synthetic
  source 1..22: mol_type = other DNA
ttcatctgtcatgactgatact

SEQ ID NO: 5130 - DNA, 22 bp, synthetic construct
  misc_feature 1..22: note = Synthetic
  source 1..22: mol_type = other DNA
ctctgcccaaatcatctgccat

SEQ ID NO: 5131 - DNA, 22 bp, synthetic construct
  misc_feature 1..22: note = Synthetic
  source 1..22: mol_type = other DNA
aaaagacttcctacattgtgtc

SEQ ID NO: 5132 - DNA, 22 bp, synthetic construct
  misc_feature 1..22: note = Synthetic
  source 1..22: mol_type = other DNA
tggcatgttttgtcattgtttt

SEQ ID NO: 5133 - DNA, 22 bp, synthetic construct
  misc_feature 1..22: note = Synthetic
  source 1..22: mol_type = other DNA
gtaactgaagcataaacatcac

SEQ ID NO: 5134 - DNA, 22 bp, synthetic construct
  misc_feature 1..22: note = Synthetic
  source 1..22: mol_type = other DNA
ctgcattttaagcataattaat

SEQ ID NO: 5135 - DNA, 22 bp, synthetic construct
  misc_feature 1..22: note = Synthetic
  source 1..22: mol_type = other DNA
ttttcttttagacacattagct

SEQ ID NO: 5136 - DNA, 22 bp, synthetic construct
  misc_feature 1..22: note = Synthetic
  source 1..22: mol_type = other DNA
agtaagtttcattctaaaatca

SEQ ID NO: 5137 - DNA, 22 bp, synthetic construct
  misc_feature 1..22: note = Synthetic
  source 1..22: mol_type = other DNA
ttaaaactcagatttaaaacaa

SEQ ID NO: 5138 - DNA, 22 bp, synthetic construct
  misc_feature 1..22: note = Synthetic
  source 1..22: mol_type = other DNA
tttaaaactcagatttaaaaca

SEQ ID NO: 5139 - DNA, 22 bp, synthetic construct
  misc_feature 1..22: note = Synthetic
  source 1..22: mol_type = other DNA
ttttaaaactcagatttaaaac

SEQ ID NO: 5140 - DNA, 22 bp, synthetic construct
  misc_feature 1..22: note = Synthetic
  source 1..22: mol_type = other DNA
acgctggaccttttctttaccc

SEQ ID NO: 5141 - DNA, 22 bp, synthetic construct
  misc_feature 1..22: note = Synthetic
  source 1..22: mol_type = other DNA
catttttttcctttatgtgacg

SEQ ID NO: 5142 - DNA, 22 bp, synthetic construct
  misc_feature 1..22: note = Synthetic
  source 1..22: mol_type = other DNA
aattaccaaattacatgaagat

SEQ ID NO: 5143 - DNA, 22 bp, synthetic construct
  misc_feature 1..22: note = Synthetic
  source 1..22: mol_type = other DNA
tcaaaagaaaacccaaagctct

SEQ ID NO: 5144 - DNA, 22 bp, synthetic construct
  misc_feature 1..22: note = Synthetic
  source 1..22: mol_type = other DNA
atttctacctcactttggtttt

SEQ ID NO: 5145 - DNA, 22 bp, synthetic construct
  misc_feature 1..22: note = Synthetic
  source 1..22: mol_type = other DNA
tatttctacctcactttggttt

SEQ ID NO: 5146 - DNA, 22 bp, synthetic construct
  misc_feature 1..22: note = Synthetic
  source 1..22: mol_type = other DNA
ctatttctacctcactttggtt

SEQ ID NO: 5147 - DNA, 22 bp, synthetic construct
  misc_feature 1..22: note = Synthetic
  source 1..22: mol_type = other DNA
ctcatgctatttctacctcact

SEQ ID NO: 5148 - DNA, 22 bp, synthetic construct
  misc_feature 1..22: note = Synthetic
  source 1..22: mol_type = other DNA
aattaattaattaacatcaaac

SEQ ID NO: 5149 - DNA, 22 bp, synthetic construct
  misc_feature 1..22: note = Synthetic
  source 1..22: mol_type = other DNA
agtgtaattagcttttggagag

SEQ ID NO: 5150 - DNA, 22 bp, synthetic construct
  misc_feature 1..22: note = Synthetic
  source 1..22: mol_type = other DNA
aagtgtaattagcttttggaga

SEQ ID NO: 5151 - DNA, 22 bp, synthetic construct
  misc_feature 1..22: note = Synthetic
  source 1..22: mol_type = other DNA
tgacatcaagtgtaattagctt

SEQ ID NO: 5152 - DNA, 22 bp, synthetic construct
  misc_feature 1..22: note = Synthetic
  source 1..22: mol_type = other DNA
agtgtaattagcttttggagag

SEQ ID NO: 5153 - DNA, 22 bp, synthetic construct
  misc_feature 1..22: note = Synthetic
  source 1..22: mol_type = other DNA
aagtgtaattagcttttggaga

SEQ ID NO: 5154 - DNA, 22 bp, synthetic construct
  misc_feature 1..22: note = Synthetic
  source 1..22: mol_type = other DNA
tgacatcaagtgtaattagctt

SEQ ID NO: 5155 - DNA, 22 bp, synthetic construct
  misc_feature 1..22: note = Synthetic
  source 1..22: mol_type = other DNA
aagaggaaaagctaaggactgg

SEQ ID NO: 5156 - DNA, 22 bp, synthetic construct
  misc_feature 1..22: note = Synthetic
  source 1..22: mol_type = other DNA
gctcaagaggaaaagctaagga

SEQ ID NO: 5157 - DNA, 22 bp, synthetic construct
  misc_feature 1..22: note = Synthetic
  source 1..22: mol_type = other DNA
gaaaagctcaagaggaaaagct

SEQ ID NO: 5158 - DNA, 22 bp, synthetic construct
  misc_feature 1..22: note = Synthetic
  source 1..22: mol_type = other DNA
aaaaaagaggagaaaagctcaa

SEQ ID NO: 5159 - DNA, 22 bp, synthetic construct
  misc_feature 1..22: note = Synthetic
  source 1..22: mol_type = other DNA
caaacaaaaattgctcaaaaaa

SEQ ID NO: 5160 - DNA, 22 bp, synthetic construct
  misc_feature 1..22: note = Synthetic
  source 1..22: mol_type = other DNA
aaacccttcttggtggattaga

SEQ ID NO: 5161 - DNA, 22 bp, synthetic construct
  misc_feature 1..22: note = Synthetic
  source 1..22: mol_type = other DNA
tgttacaaaaaaacccttcttg

SEQ ID NO: 5162 - DNA, 22 bp, synthetic construct
  misc_feature 1..22: note = Synthetic
  source 1..22: mol_type = other DNA
aaatgttacaaaaaaacccttc

SEQ ID NO: 5163 - DNA, 22 bp, synthetic construct
  misc_feature 1..22: note = Synthetic
  source 1..22: mol_type = other DNA
ggtttgtaagtaagtaagaaag

SEQ ID NO: 5164 - DNA, 22 bp, synthetic construct
  misc_feature 1..22: note = Synthetic
  source 1..22: mol_type = other DNA
tttctctgcgagtagttccaca

SEQ ID NO: 5165 - DNA, 22 bp, synthetic construct
  misc_feature 1..22: note = Synthetic
  source 1..22: mol_type = other DNA
cccatcacatttgtgatactga

SEQ ID NO: 5166 - DNA, 22 bp, synthetic construct
  misc_feature 1..22: note = Synthetic
  source 1..22: mol_type = other DNA
taaaataaataaactttgggaa

SEQ ID NO: 5167 - DNA, 22 bp, synthetic construct
  misc_feature 1..22: note = Synthetic
  source 1..22: mol_type = other DNA
ataatttaaaataaataaactt

SEQ ID NO: 5168 - DNA, 22 bp, synthetic construct
  misc_feature 1..22: note = Synthetic
  source 1..22: mol_type = other DNA
cataatttaaaataaataaact

SEQ ID NO: 5169 - DNA, 22 bp, synthetic construct
  misc_feature 1..22: note = Synthetic
  source 1..22: mol_type = other DNA
tttttagatttattgtcccatg

SEQ ID NO: 5170 - DNA, 22 bp, synthetic construct
  misc_feature 1..22: note = Synthetic
  source 1..22: mol_type = other DNA
ttttttagatttattgtcccat

SEQ ID NO: 5171 - DNA, 22 bp, synthetic construct
  misc_feature 1..22: note = Synthetic
  source 1..22: mol_type = other DNA
cagtcaaaaggaactgggtggt

SEQ ID NO: 5172 - DNA, 22 bp, synthetic construct
  misc_feature 1..22: note = Synthetic
  source 1..22: mol_type = other DNA
tctcacagtcaaaaggaactgg

SEQ ID NO: 5173 - DNA, 22 bp, synthetic construct
  misc_feature 1..22: note = Synthetic
  source 1..22: mol_type = other DNA
tcttctcacagtcaaaaggaac

SEQ ID NO: 5174 - DNA, 22 bp, synthetic construct
  misc_feature 1..22: note = Synthetic
  source 1..22: mol_type = other DNA
ctcttctcacagtcaaaaggaa

SEQ ID NO: 5175 - DNA, 22 bp, synthetic construct
  misc_feature 1..22: note = Synthetic
  source 1..22: mol_type = other DNA
tatgccctcttctcacagtcaa

SEQ ID NO: 5176 - DNA, 22 bp, synthetic construct
  misc_feature 1..22: note = Synthetic
  source 1..22: mol_type = other DNA
aggccactctttaagtgaagga

SEQ ID NO: 5177 - DNA, 22 bp, synthetic construct
  misc_feature 1..22: note = Synthetic
  source 1..22: mol_type = other DNA
ggagtaggccactctttaagtg

SEQ ID NO: 5178 - DNA, 22 bp, synthetic construct
  misc_feature 1..22: note = Synthetic
  source 1..22: mol_type = other DNA
ccagcccatccctgtgaaggag

SEQ ID NO: 5179 - DNA, 22 bp, synthetic construct
  misc_feature 1..22: note = Synthetic
  source 1..22: mol_type = other DNA
ggattcccagcccatccctgtg

SEQ ID NO: 5180 - DNA, 22 bp, synthetic construct
  misc_feature 1..22: note = Synthetic
  source 1..22: mol_type = other DNA
acgatgatagggctggagggct

SEQ ID NO: 5181 - DNA, 22 bp, synthetic construct
  misc_feature 1..22: note = Synthetic
  source 1..22: mol_type = other DNA
agcaggacgatgatagggctgg

SEQ ID NO: 5182 - DNA, 22 bp, synthetic construct
  misc_feature 1..22: note = Synthetic
  source 1..22: mol_type = other DNA
tagcaggacgatgatagggctg

SEQ ID NO: 5183 - DNA, 22 bp, synthetic construct
  misc_feature 1..22: note = Synthetic
  source 1..22: mol_type = other DNA
cagtagcaggacgatgataggg

SEQ ID NO: 5184 - DNA, 22 bp, synthetic construct
  misc_feature 1..22: note = Synthetic
  source 1..22: mol_type = other DNA
caagcagtagcaggacgatgat

SEQ ID NO: 5185 - DNA, 22 bp, synthetic construct
  misc_feature 1..22: note = Synthetic
  source 1..22: mol_type = other DNA
ccaagcagtagcaggacgatga

SEQ ID NO: 5186 - DNA, 22 bp, synthetic construct
  misc_feature 1..22: note = Synthetic
  source 1..22: mol_type = other DNA
ttttttaactcccaagcagtag

SEQ ID NO: 5187 - DNA, 22 bp, synthetic construct
  misc_feature 1..22: note = Synthetic
  source 1..22: mol_type = other DNA
attctgaccttgtgaacatcag

SEQ ID NO: 5188 - DNA, 22 bp, synthetic construct
  misc_feature 1..22: note = Synthetic
  source 1..22: mol_type = other DNA
tgcttcagtggaaatcaatcag

SEQ ID NO: 5189 - DNA, 22 bp, synthetic construct
  misc_feature 1..22: note = Synthetic
  source 1..22: mol_type = other DNA
atttagatttaatgatgcttca

SEQ ID NO: 5190 - DNA, 22 bp, synthetic construct
  misc_feature 1..22: note = Synthetic
  source 1..22: mol_type = other DNA
atcagagtgagtaatcggttgg

SEQ ID NO: 5191 - DNA, 22 bp, synthetic construct
  misc_feature 1..22: note = Synthetic
  source 1..22: mol_type = other DNA
ttatatcagagtgagtaatcgg

SEQ ID NO: 5192 - DNA, 22 bp, synthetic construct
  misc_feature 1..22: note = Synthetic
  source 1..22: mol_type = other DNA
cttattatatcagagtgagtaa

SEQ ID NO: 5193 - DNA, 22 bp, synthetic construct
  misc_feature 1..22: note = Synthetic
  source 1..22: mol_type = other DNA
agggaacatgtgaatgaataca

SEQ ID NO: 5194 - DNA, 22 bp, synthetic construct
  misc_feature 1..22: note = Synthetic
  source 1..22: mol_type = other DNA
gtaaagtattggatttttttaa

SEQ ID NO: 5195 - DNA, 22 bp, synthetic construct
  misc_feature 1..22: note = Synthetic
  source 1..22: mol_type = other DNA
agtaaagtattggattttttta

SEQ ID NO: 5196 - DNA, 22 bp, synthetic construct
  misc_feature 1..22: note = Synthetic
  source 1..22: mol_type = other DNA
acaacgaaagtaaagtaaagta

SEQ ID NO: 5197 - DNA, 22 bp, synthetic construct
  misc_feature 1..22: note = Synthetic
  source 1..22: mol_type = other DNA
ttttcccggagccggaagccag

SEQ ID NO: 5198 - DNA, 22 bp, synthetic construct
  misc_feature 1..22: note = Synthetic
  source 1..22: mol_type = other DNA
gatttttcccggagccggaagc

SEQ ID NO: 5199 - DNA, 22 bp, synthetic construct
  misc_feature 1..22: note = Synthetic
  source 1..22: mol_type = other DNA
ctagaatggatttttcccggag

SEQ ID NO: 5200 - DNA, 22 bp, synthetic construct
  misc_feature 1..22: note = Synthetic
  source 1..22: mol_type = other DNA
cttggtctagaatggatttttc

SEQ ID NO: 5201 - DNA, 22 bp, synthetic construct
  misc_feature 1..22: note = Synthetic
  source 1..22: mol_type = other DNA
aggcttacctgcttggtctaga

SEQ ID NO: 5202 - DNA, 22 bp, synthetic construct
  misc_feature 1..22: note = Synthetic
  source 1..22: mol_type = other DNA
tcagtcatccaggcttacctgc

SEQ ID NO: 5203 - DNA, 22 bp, synthetic construct
  misc_feature 1..22: note = Synthetic
  source 1..22: mol_type = other DNA
aaattacttctagtcagtcatc

SEQ ID NO: 5204 - DNA, 22 bp, synthetic construct
  misc_feature 1..22: note = Synthetic
  source 1..22: mol_type = other DNA
gagaactgtcagctgagtgggg

SEQ ID NO: 5205 - DNA, 22 bp, synthetic construct
  misc_feature 1..22: note = Synthetic
  source 1..22: mol_type = other DNA
atttgagaactgtcagctgagt

SEQ ID NO: 5206 - DNA, 22 bp, synthetic construct
  misc_feature 1..22: note = Synthetic
  source 1..22: mol_type = other DNA
catttgagaactgtcagctgag

SEQ ID NO: 5207 - DNA, 22 bp, synthetic construct
  misc_feature 1..22: note = Synthetic
  source 1..22: mol_type = other DNA
tcatttgagaactgtcagctga

SEQ ID NO: 5208 - DNA, 22 bp, synthetic construct
  misc_feature 1..22: note = Synthetic
  source 1..22: mol_type = other DNA
gcgtgatatccatatgaaattc

SEQ ID NO: 5209 - DNA, 22 bp, synthetic construct
  misc_feature 1..22: note = Synthetic
  source 1..22: mol_type = other DNA
cagcgcattgttttgcatcctt

SEQ ID NO: 5210 - DNA, 22 bp, synthetic construct
  misc_feature 1..22: note = Synthetic
  source 1..22: mol_type = other DNA
acacacacacacacaaaacttt

SEQ ID NO: 5211 - DNA, 22 bp, synthetic construct
  misc_feature 1..22: note = Synthetic
  source 1..22: mol_type = other DNA
tttctttatatggaacgcattt

SEQ ID NO: 5212 - DNA, 22 bp, synthetic construct
  misc_feature 1..22: note = Synthetic
  source 1..22: mol_type = other DNA
atttctttatatggaacgcatt

SEQ ID NO: 5213 - DNA, 22 bp, synthetic construct
  misc_feature 1..22: note = Synthetic
  source 1..22: mol_type = other DNA
aaataacttgccatttctttat

SEQ ID NO: 5214 - DNA, 22 bp, synthetic construct
  misc_feature 1..22: note = Synthetic
  source 1..22: mol_type = other DNA
gttattgttttgttaacaatgg

SEQ ID NO: 5215 - DNA, 22 bp, synthetic construct
  misc_feature 1..22: note = Synthetic
  source 1..22: mol_type = other DNA
gtctgttattgttttgttaaca

SEQ ID NO: 5216 - DNA, 22 bp, synthetic construct
  misc_feature 1..22: note = Synthetic
  source 1..22: mol_type = other DNA
atctatatttttgtgaagggta

SEQ ID NO: 5217 - DNA, 22 bp, synthetic construct
  misc_feature 1..22: note = Synthetic
  source 1..22: mol_type = other DNA
aaataaatctatatttttgtga

SEQ ID NO: 5218 - DNA, 22 bp, synthetic construct
  misc_feature 1..22: note = Synthetic
  source 1..22: mol_type = other DNA
gaaataaatctatatttttgtg

SEQ ID NO: 5219 - DNA, 22 bp, synthetic construct
  misc_feature 1..22: note = Synthetic
  source 1..22: mol_type = other DNA
tttataatattcatacaacaaa

SEQ ID NO: 5220 - DNA, 22 bp, synthetic construct
  misc_feature 1..22: note = Synthetic
  source 1..22: mol_type = other DNA
ttttacaactcctgattcccgc

SEQ ID NO: 5221 - DNA, 22 bp, synthetic construct
  misc_feature 1..22: note = Synthetic
  source 1..22: mol_type = other DNA
gtatcagtcatgacagatgaag

SEQ ID NO: 5222 - DNA, 22 bp, synthetic construct
  misc_feature 1..22: note = Synthetic
  source 1..22: mol_type = other DNA
ggcagatgatttgggcagagcg

SEQ ID NO: 5223 - DNA, 22 bp, synthetic construct
  misc_feature 1..22: note = Synthetic
  source 1..22: mol_type = other DNA
cttttccacatggcagatgatt

SEQ ID NO: 5224 - DNA, 22 bp, synthetic construct
  misc_feature 1..22: note = Synthetic
  source 1..22: mol_type = other DNA
tcttttccacatggcagatgat

SEQ ID NO: 5225 - DNA, 22 bp, synthetic construct
  misc_feature 1..22: note = Synthetic
  source 1..22: mol_type = other DNA
caatgtaggaagtcttttccac

SEQ ID NO: 5226 - DNA, 22 bp, synthetic construct
  misc_feature 1..22: note = Synthetic
  source 1..22: mol_type = other DNA
ctttgttttccaggacacaatg

SEQ ID NO: 5227-7020 - skipped (1794 entries)

SEQ ID NO: 7021 - protein, 1057 aa, synthetic construct
  REGION 1..1057: note = Synthetic
MNQKFILGLDIGITSVGYGLIDYETKNIIDAGVRLFPEANVENNEGRRSKRGSRRLKRRRIHRLDRVKHLLAEYDLLDLTNIPKSTNPYQTRVKGLNEKLSKDELVIALLHIAKRRGIHNVDVAADKEETASDSLSTKDQINKNAKFLESRYVCELQKERLENEGHVRGVENRFLTKDIVREAKKIIDTQMQYYPEIDETFKEKYISLVETRREYFEGPGKGSPFGWEGNIKKWFEQMMGHCTYFPEELRSVKYSYSAELFNALNDLNNLVITRDEDAKLNYGEKFQIIENVFKQKKTPNLKQIAIEIGVHETEIKGYRVNKSGTPEFTEFKLYHDLKSIVFDKSILENEAILDQIAEILTIYQDEQSIKEELNKLPEILNEQDKAEIAKLIGYNGTHRLSLKCIHLINEELWQTSRNQMEIFNYLNIKPNKVDLSEQNKIPKDMVNDFILSPVVKRTFIQSINVINKVIEKYGIPEDIIIELARENNSDDRKKFINNLQKKNEATRKRINEIIGQTGNQNAKRIVEKIRLHDQQEGKCLYSLKDIPLEDLLRNPNNYDIDHIIPRSVSFDDSMHNKVLVRREQNAKKNNQTPYQYLTSGYADIKYSVFKQHVLNLAENKDRMTKKKREYLLEERDINKFEVQKEFINRNLVDTRYATRELTNYLKAYFSANNMNVKVKTINGSFTDYLRKVWKFKKERNHGYKHHAEDALIIANADFLFKENKKLKAVNSVLEKPEIETKQLDIQVDSEDNYSEMFIIPKQVQDIKDFRNFKYSHRVDKKPNRQLINDTLYSTRKKDNSTYIVQTIKDIYAKDNTTLKKQFDKSPEKFLMYQHDPRTFEKLEVIMKQYANEKNPLAKYHEETGEYLTKYSKKNNGPIVKSLKYIGNKLGSHLDVTHQFKSSTKKLVKLSIKPYRFDVYLTDKGYKFITISYLDVLKKDNYYYIPEQKYDKLKLGKAIDKNAKFIASFYKNDLIKLDGEIYKIIGVNSDTRNMIELDLPDIRYKEYCELNNIKGEPRIKKTIGKKVNSIEKLTTDVLGNVFTNTQYTKPQLLFKRGN

SEQ ID NO: 7022 - protein, 1053 aa, synthetic construct
  REGION 1..1053: note = Synthetic
MNQKFILGLDIGITSVGYGLIDYETKNIIDAGVRLFPEANVENNEGRRSKRGSRRLKRRRIHRLERVKSLLSEYKIISGLAPTNNQPYNIRVKGLTEQLTKDELAVALLHIAKRRGIHKIDVIDSNDDVGNELSTKEQLNKNSKLLKDKFVCQIQLERMNEGQVRGEKNRFKTADIIKEIIQLLNVQKNFHQLDENFINKYIELVEMRREYFEGPGQGSPFGWNGDLKKWYEMLMGHCTYFPQELRSVKYAYSADLFNALNDLNNLIIQRDNSEKLEYHEKYHIIENVFKQKKKPTLKQIAKEIGVNPEDIKGYRITKSGTPEFTEFKLYHDLKSVLFDQSILENEDVLDQIAEILTIYQDKDSIKSKLTELDILLNEEDKENIAQLTGYNGTHRLSLKCIRLVLEEQWYSSRNQMEIFTHLNIKPKKINLTAANKIPKAMIDEFILSPVVKRTFIQSINVINKVIEKYGIPEDIIIELARENNSDDRKKFINNLQKKNEATRKRINEIIGQTGNQNAKRIVEKIRLHDQQEGKCLYSLESIALMDLLNNPQNYEVDHIIPRSVAFDNSIHNKVLVKQIENSKKGNRTPYQYLNSSDAKLSYNQFKQHILNLSKSKDRISKKKKDYLLEERDINKFEVQKEFINRNLVDTRYATRELTSYLKAYFSANNMDVKVKTINGSFTNHLRKVWRFDKYRNHGYKHHAEDALIIANADFLFKENKKLKAVNSVLEKPEIETKQLDIQVDSEDNYSEMFIIPKQVQDIKDFRNFKYSHRVDKKPNRQLINDTLYSTRKKDNSTYIVQTIKDIYAKDNTTLKKQFDKSPEKFLMYQHDPRTFEKLEVIMKQYANEKNPLAKYHEETGEYLTKYSKKNNGPIVKSLKYIGNKLGSHLDVTHQFKSSTKKLVKLSIKPYRFDVYLTDKGYKFITISYLDVLKKDNYYYIPEQKYDKLKLGKAIDKNAKFIASFYKNDLIKLDGEIYKIIGVNSDTRNMIELDLPDIRYKEYCELNNIKGEPRIKKTIGKKVNSIEKLTTDVLGNVFTNTQYTKPQLLFKRGN

SEQ ID NO: 7023 - protein, 1057 aa, synthetic construct
  REGION 1..1057: note = Synthetic
MNQKFILGLDIGITSVGYGLIDYETKNIIDAGVRLFPEANVENNEGRRSKRGSRRLKRRRIHRLERVKLLLTEYDLINKEQIPTSNNPYQIRVKGLSEILSKDELAIALLHLAKRRGIHNVDVAADKEETASDSLSTKDQINKNAKFLESRYVCELQKERLENEGHVRGVENRFLTKDIVREAKKIIDTQMQYYPEIDETFKEKYISLVETRREYFEGPGQGSPFGWNGDLKKWYEMLMGHCTYFPQELRSVKYAYSADLFNALNDLNNLIIQRDNSEKLEYHEKYHIIENVFKQKKKPTLKQIAKEIGVNPEDIKGYRITKSGTPEFTSFKLFHDLKKVVKDHAILDDIDLLNQIAEILTIYQDKDSIVAELGQLEYLMSEADKQSISELTGYTGTHSLSLKCMNMIIDELWHSSMNQMEVFTYLNMRPKKYELKGYQRIPTDMIDDAILSPVVKRTFIQSINVINKVIEKYGIPEDIIIELARENNSDDRKKFINNLQKKNEATRKRINEIIGQTGNQNAKRIVEKIRLHDQQEGKCLYSLESIPLEDLLNNPNHYEVDHIIPRSVSFDNSYHNKVLVKQSENSKKSNLTPYQYFNSGKSKLSYNQFKQHILNLSKSQDRISKKKKEYLLEERDINKFEVQKEFINRNLVDTRYATRELTNYLKAYFSANNMNVKVKTINGSFTDYLRKVWKFKKERNHGYKHHAEDALIIANADFLFKENKKLKAVNSVLEKPEIETKQLDIQVDSEDNYSEMFIIPKQVQDIKDFRNFKYSHRVDKKPNRQLINDTLYSTRKKDNSTYIVQTIKDIYAKDNTTLKKQFDKSPEKFLMYQHDPRTFEKLEVIMKQYANEKNPLAKYHEETGEYLTKYSKKNNGPIVKSLKYIGNKLGSHLDVTHQFKSSTKKLVKLSIKPYRFDVYLTDKGYKFITISYLDVLKKDNYYYIPEQKYDKLKLGKAIDKNAKFIASFYKNDLIKLDGEIYKIIGVNSDTRNMIELDLPDIRYKEYCELNNIKGEPRIKKTIGKKVNSIEKLTTDVLGNVFTNTQYTKPQLLFKRGN

SEQ ID NO: 7024 - protein, 1057 aa, synthetic construct
  REGION 1..1057: note = Synthetic
MNQKFILGLDIGITSVGYGLIDYETKNIIDAGVRLFPEANVENNEGRRSKRGSRRLKRRRIHRLERVKLLLTEYDLINKEQIPTSNNPYQIRVKGLSEILSKDELAIALLHLAKRRGIHNVDVAADKEETASDSLSTKDQINKNAKFLESRYVCELQKERLENEGHVRGVENRFLTKDIVREAKKIIDTQMQYYPEIDETFKEKYISLVETRREYFEGPGQGSPFGWNGDLKKWYEMLMGHCTYFPQELRSVKYAYSADLFNALNDLNNLIIQRDNSEKLEYHEKYHIIENVFKQKKKPTLKQIAKEIGVNPEDIKGYRITKSGTPEFTSFKLFHDLKKVVKDHAILDDIDLLNQIAEILTIYQDKDSIVAELGQLEYLMSEADKQSISELTGYTGTHSLSLKCMNMIIDELWHSSMNQMEVFTYLNMRPKKYELKGYQRIPTDMIDDAILSPVVKRTFIQSINVINKVIEKYGIPEDIIIELARENNSDDRKKFINNLQKKNEATRKRINEIIGQTGNQNAKRIVEKIRLHDQQEGKCLYSLESIPLEDLLNNPNHYEVDHIIPRSVSFDNSYHNKVLVKQSENSKKSNLTPYQYFNSGKSKLSYNQFKQHILNLSKSQDRISKKKKEYLLEERDINKFEVQKEFINRNLVDTRYATRELTNYLKAYFSANNMNVKVKTINGSFTDYLRKVWKFKKERNHGYKHHAEDALIIANADFLFKENKKLKAVNSVLEKPEIETKQLDIQVDSEDNYSEMFIIPKQVQDIKDFRNFKYSHRVDKKPNRQLINDTLYSTRKKDNSTYIVQTIKDIYAKDNTTLKKQFDKSPEKFLMYQHDPRTFEKLEVIMKQYANEKNPLAKYHEETGEYLTKYSKKNNGPIVKSLKYIGNKLGSHLDVTHQFKSSTKKLVKLSIKNYRFDVYLTEKGYKFVTIAYLNVFKKDNYYYIPKDKYQELKEKKKIKDTDQFIASFYKNDLIKLNGDLYKIIGVNSDDRNIIELDYYDIKYKDYCEINNIKGEPRIKKTIGKKTESIEKFTTDVLGNLYLHSTEKAPQLIFKRGL

SEQ ID NO: 7025 - protein, 1057 aa, synthetic construct
  REGION 1..1057: note = Synthetic
MNQKFILGLDIGITSVGYGLIDYETKNIIDAGVRLFPEANVENNEGRRSKRGSRRLKRRRIHRLERVKLLLTEYDLINKEQIPTSNNPYQIRVKGLSEILSKDELAIALLHLAKRRGIHNVDVAADKEETASDSLSTKDQINKNAKFLESRYVCELQKERLENEGHVRGVENRFLTKDIVREAKKIIDTQMQYYPEIDETFKEKYISLVETRREYFEGPGQGSPFGWNGDLKKWYEMLMGHCTYFPQELRSVKYAYSADLFNALNDLNNLIIQRDNSEKLEYHEKYHIIENVFKQKKKPTLKQIAKEIGVNPEDIKGYRITKSGTPEFTSFKLFHDLKKVVKDHAILDDIDLLNQIAEILTIYQDKDSIVAELGQLEYLMSEADKQSISELTGYTGTHSLSLKCMNMIIDELWHSSMNQMEVFTYLNMRPKKYELKGYQRIPTDMIDDAILSPVVKRTFIQSINVINKVIEKYGIPEDIIIELARENNSDDRKKFINNLQKKNEATRKRINEIIGQTGNQNAKRIVEKIRLHDQQEGKCLYSLESIPLEDLLNNPNHYEVDHIIPRSVSFDNSYHNKVLVKQSENSKKSNLTPYQYFNSGKSKLSYNQFKQHILNLSKSQDRISKKKKEYLLEERDINKFEVQKEFINRNLVDTRYATRELTNYLKAYFSANNMNVKVKTINGSFTDYLRKVWKFKKERNHGYKHHAEDALIIANADFLFKENKKLKAVNSVLEKPEIETKQLDIQVDSEDNYSEMFIIPKQVQDIKDFRNFKFSHRVDKKPNRQLINDTLYSTRMKDEHDYIVQTITDIYGKDNTNLKKQFNKNPEKFLMYQNDPKTFEKLSIIMKQYSDEKNPLAKYYEETGEYLTKYSKKNNGPIVKKIKLLGNKVGNHLDVTNKYENSTKKLVKLSIKNYRFDVYLTEKGYKFVTIAYLNVFKKDNYYYIPKDKYQELKEKKKIKDTDQFIASFYKNDLIKLNGDLYKIIGVNSDDRNIIELDYYDIKYKDYCEINNIKGEPRIKKTIGKKTESIEKFTTDVLGNLYLHSTEKAPQLIFKRGL

SEQ ID NO: 7026 - protein, 1057 aa, synthetic construct
  REGION 1..1057: note = Synthetic
MNQKFILGLDIGITSVGYGLIDYETKNIIDAGVRLFPEANVENNEGRRSKRGSRRLKRRRIHRLERVKLLLTEYDLINKEQIPTSNNPYQIRVKGLSEILSKDELAIALLHLAKRRGIHNVDVAADKEETASDSLSTKDQINKNAKFLESRYVCELQKERLENEGHVRGVENRFLTKDIVREAKKIIDTQMQYYPEIDETFKEKYISLVETRREYFEGPGQGSPFGWNGDLKKWYEMLMGHCTYFPQELRSVKYAYSADLFNALNDLNNLIIQRDNSEKLEYHEKYHIIENVFKQKKKPTLKQIAKEIGVNPEDIKGYRITKSGTPEFTSFKLFHDLKKVVKDHAILDDIDLLNQIAEILTIYQDKDSIVAELGQLEYLMSEADKQSISELTGYTGTHSLSLKCMNMIIDELWHSSMNQMEVFTYLNMRPKKYELKGYQRIPTDMIDDAILSPVVKRTFIQSINVINKVIEKYGIPEDIIIELARENNSDDRKKFINNLQKKNEATRKRINEIIGQTGNQNAKRIVEKIRLHDQQEGKCLYSLESIPLEDLLNNPNHYEVDHIIPRSVSFDNSYHNKVLVKQSENSKKSNLTPYQYFNSGKSKLSYNQFKQHILNLSKSQDRISKKKKEYLLEERDINKFEVQKEFINRNLVDTRYATRELTSYLKAYFSANNMDVKVKTINGSFTNHLRKVWRFDKYRNHGYKHHAEDALIIANADFLFKENKKLQNTNKILEKPTIENNTKKVTVEKEEDYNNVFETPKLVEDIKQYRDYKFSHRVDKKPNRQLINDTLYSTRMKDEHDYIVQTITDIYGKDNTNLKKQFNKNPEKFLMYQNDPKTFEKLSIIMKQYSDEKNPLAKYYEETGEYLTKYSKKNNGPIVKKIKLLGNKVGNHLDVTNKYENSTKKLVKLSIKNYRFDVYLTEKGYKFVTIAYLNVFKKDNYYYIPKDKYQELKEKKKIKDTDQFIASFYKNDLIKLNGDLYKIIGVNSDDRNIIELDYYDIKYKDYCEINNIKGEPRIKKTIGKKTESIEKFTTDVLGNLYLHSTEKAPQLIFKRGL

SEQ ID NO: 7027 - protein, 1054 aa, synthetic construct
  REGION 1..1054: note = Synthetic
MNQKFILGLDIGITSVGYGLIDYETKNIIDAGVRLFPEANVENNEGRRSKRGSRRLKRRRIHRLERVKKLLEDYNLLDQSQIPQSTNPYAIRVKGLSEALSKDELVIALLHIAKRRGIHNINVSSEDEDASNELSTKEQINRNNKLLKDKYVCEVQLQRLKEGQIRGEKNRFKTTDILKEIDQLLKVQKDYHNLDIDFINQYKEIVETRREYFEGPGKGSPYGWEGDPKAWYETLMGHCTYFPDELRSVKYAYSADLFNALNDLNNLVIQRDGLSKLEYHEKYHIIENVFKQKKKPTLKQIANEINVNPEDIKGYRITKSGKPEFTSFKLFHDLKKVVKDHAILDDIDLLNQIAEILTIYQDKDSIVAELGQLEYLMSEADKQSISELTGYTGTHSLSLKCMNMIIDELWHSSMNQMEVFTYLNMRPKKYELKGYQRIPTDMIDDAILSPVVKRTFIQSINVINKVIEKYGIPEDIIIELARENNSDDRKKFINNLQKKNEATRKRINEIIGQTGNQNAKRIVEKIRLHDQQEGKCLYSLESIPLEDLLNNPNHYEVDHIIPRSVSFDNSYHNKVLVKQSENSKKSNLTPYQYFNSGKSKLSYNQFKQHILNLSKSQDRISKKKKEYLLEERDINKFEVQKEFINRNLVDTRYATRELTNYLKAYFSANNMNVKVKTINGSFTDYLRKVWKFKKERNHGYKHHAEDALIIANADFLFKENKKLKAVNSVLEKPEIETKQLDIQVDSEDNYSEMFIIPKQVQDIKDFRNFKYSHRVDKKPNRQLINDTLYSTRKKDNSTYIVQTIKDIYAKDNTTLKKQFDKSPEKFLMYQHDPRTFEKLEVIMKQYANEKNPLAKYHEETGEYLTKYSKKNNGPIVKSLKYIGNKLGSHLDVTHQFKSSTKKLVKLSIKPYRFDVYLTDKGYKFITISYLDVLKKDNYYYIPEQKYDKLKLGKAIDKNAKFIASFYKNDLIKLDGEIYKIIGVNSDTRNMIELDLPDIRYKEYCELNNIKGEPRIKKTIGKKVNSIEKLTTDVLGNVFTNTQYTKPQLLFKRGN

SEQ ID NO: 7028 - protein, 1051 aa, Staphylococcus hyicus
MNNYILGLDIGITSVGYGIVDSDTREIKDAGVRLFPEANVDNNEGRRSKRGARRLKRRRIHRLDRVKHLLAEYDLLDLTNIPKSTNPYQTRVKGLNEKLSKDELVIALLHIAKRRGIHNVNVMMDDNDSGNELSTKDQLKKNAKALSDKYVCELQLERFEQDYKVRGEKNRFKTEDFVREARKLLETQSKFFEIDQTFIMRYIELIETRREYFEGPGKGSPFGWEGNIKKWFEQMMGHCTYFPEELRSVKYSYSAELFNALNDLNNLVITRDEDAKLNYGEKFQIIENVFKQKKTPNLKQIAIEIGVHETEIKGYRVNKSGKPEFTQFKLYHDLKNIFKDPKYLNDIQLMDNIAEIITIYQDAESIIKELNQLPELLSEREKEKISALSGYSGTHRLSLKCINLLLDDLWESSLNQMELFTKLNLKPKKIDLSQQHKIPSKLVDDFILSPVVKRAFIQSIQVVNAIIDKYGLPEDIIIELARENNSDDRRKFLNQLQKQNEETRKQVEKVLREYGNDNAKRIVQKIKLHNMQEGKCLYSLKDIPLEDLLRNPHHYEVDHIIPRSVAFDNSMHNKVLVRADENSKKGNRTPYQYLNSSESSLSYNEFKQHILNLSKTKDRITKKKREYLLEERDINKFDVQKEFINRNLVDTRYATRELTSLLKAYFSANNLDVKVKTINGSFTNYLRKVWKFDKDRNKGYKHHAEDALIIANADFLFKHNKKLRNINKVLDAPSKEVDKKRVTVQSEDEYNQIFEDTQKAQAIKKFEIRKFSHRVDKKPNRQLINDTLYSTRNIDGIEYVVESIKDIYSVNNDKVKTKFKKDPHRLLMYRNDPQTFEKFEKVFKQYESEKNPFAKYYEETGEKIRKFSKTGQGPYINKIKYLRERLGRHCDVTNKYINSRNKIVQLKIYSYRFDIYQYGNNYKMITISYIDLEQKSNYYYISREKYEQKKKDKQIDDSYKFIGSFYKNDIINYNGEMYRVIGVNDSEKNKIQLDMIDISIKDYMELNNIKKTGVIYKTIGKSTTHIEKYTTDILGNLYKAAPPKKPQLIFK

SEQ ID NO: 7029 - protein, 1052 aa, Staphylococcus microti
MEKDYILGLDIGIGSVGYGLIDYDTKSIIDAGVRLFPEANADNNLGRRAKRGARRLKRRRIHRLERVKSLLSEYKIISGLAPTNNQPYNIRVKGLTEQLTKDELAVALLHIAKRRGIHNVDVAADKEETASDSLSTKDQINKNAKFLESRYVCELQKERLENEGHVRGVENRFLTKDIVREAKKIIDTQMQYYPEIDETFKEKYISLVETRREYYEGPGKGSPYGWDADVKKWYQLMMGHCTYFPVEFRSVKYAYTADLYNALNDLNNLTIARDDNPKLEYHEKYHIIENVFKQKRNPTLKQIAKEIGVNDINISGYRVTKSGKPQFTSFKLFHDLKKVVKDHAILDDIDLLNQIAEILTIYQDKDSIVAELGQLEYLMSEADKQSISELTGYTGTHSLSLKCMNMIIDELWHSSMNQMEVFTYLNMRPKKYELKGYQRIPTDMIDDAILSPVVKRSFKQAIGVVNAIIKKYGLPKDIIIELARESNSAEKSRYLRAIQKKNEKTRERIEAIIKEYGNENAKGLVQKIKLHDAQEGKCLYSLKDIPLEDLLRNPNNYDIDHIIPRSVSFDDSMHNKVLVRREQNAKKNNQTPYQYLTSGYADIKYSVFKQHVLNLAENKDRMTKKKREYLLEERNINKYDVQKEFINRNLVDTRYTTRELTTLLKTYFTINNLDVKVKTINGSFTDFLRKRWGFKKNRDEGYKHHAEDALIIANADYLFKEHKLLKEIKDVSDLAGDERNSNVKDEDQYEEVFGGYFKIEDIKKYKIKKFSHRVDKKPNRQLINDTIYSTRVKDDKRYLINTLKNLYDKSNGDLKERMQKDPESLLMYHHDPQTFEKLKIVMSQYENEKNPLAKYFEETGQYLTKYAKHDNGPAIHKIKYYGNKLVEHLDITKNYHNPQNKVVQLSQKSFRFDVYQTDKGYKFISIAYLTLKNEKNYYAISQEKYDQLKSEKKISNNAVFIGSFYTSDIIEINNEKFRVIGVNSDKNNLIEVDRIDIRQKEFIELEEEKKNNRIKVTIGRKTTNIEKFHTDILGNMYKSKRPKAPQLVFKKG

SEQ ID NO: 7030 - protein, 1054 aa, Staphylococcus pasteuri
MKEKYILGLDLGITSVGYGIINFETKKIIDAGVRLFPEANVDNNEGRRSKRGSRRLKRRRIHRLERVKLLLTEYDLINKEQIPTSNNPYQIRVKGLSEILSKDELAIALLHLAKRRGIHNINVSSEDEDASNELSTKEQINRNNKLLKDKYVCEVQLQRLKEGQIRGEKNRFKTTDILKEIDQLLKVQKDYHNLDIDFINQYKEIVETRREYFEGPGQGSPFGWNGDLKKWYEMLMGHCTYFPQELRSVKYAYSADLFNALNDLNNLIIQRDNSEKLEYHEKYHIIENVFKQKKKPTLKQIAKEIGVNPEDIKGYRITKSGTPQFTEFKLYHDLKSIVFDKSILENEAILDQIAEILTIYQDEQSIKEELNKLPEILNEQDKAEIAKLIGYNGTHRLSLKCIHLINEELWQTSRNQMEIFNYLNIKPNKVDLSEQNKIPKDMVNDFILSPVVKRTFIQSINVINKVIEKYGIPEDIIIELARENNSDDRKKFINNLQKKNEATRKRINEIIGQTGNQNAKRIVEKIRLHDQQEGKCLYSLESIALMDLLNNPQNYEVDHIIPRSVAFDNSIHNKVLVKQIENSKKGNRTPYQYLNSSDAKLSYNQFKQHILNLSKSKDRISKKKKDYLLEERDINKFEVQKEFINRNLVDTRYATRELTSYLKAYFSANNMDVKVKTINGSFTNHLRKVWRFDKYRNHGYKHHAEDALIIANADFLFKENKKLQNTNKILEKPTIENNTKKVTVEKEEDYNNVFETPKLVEDIKQYRDYKFSHRVDKKPNRQLINDTLYSTRMKDEHDYIVQTITDIYGKDNTNLKKQFNKNPEKFLMYQNDPKTFEKLSIIMKQYSDEKNPLAKYYEETGEYLTKYSKKNNGPIVKKIKLLGNKVGNHLDVTNKYENSTKKLVKLSIKNYRFDVYLTEKGYKFVTIAYLNVFKKDNYYYIPKDKYQELKEKKKIKDTDQFIASFYKNDLIKLNGDLYKIIGVNSDDRNIIELDYYDIKYKDYCEINNIKGEPRIKKTIGKKTESIEKFTTDVLGNLYLHSTEKAPQLIFKRGL

SEQ ID NO: 7031 - protein, 1093 aa, synthetic construct
  REGION 1..1093: note = Synthetic
MSNKEKNASETRKAYTTKMIPRSHDRMKLLGNFMDYLMDGTPIFFELWNQFGGGIDRDIISGTANKDKISDDLLLAVNWFKVMPINSKPQGVSPSNLANLFQQYSGSEPDIQAQEYFASNFDTEKHQWKDMRVEYERLLAELQLSRSDMHHDLKLMYKEKCIGLSLSTAHYITSVMFGTGAKNNRQTKHQFYSKVIQLLEESTQINSVEQLASIILKAGDCDSYRKLRIRCSRKGATPSILKIVQDYELGTNHDDEVNVPSLIANLKEKLGRFEYECEWKCMEKIKAFLASKVGPYYLGSYSAMLENALSPIKGMTTKNCKFVLKQIDAKNDIKYENEPFGKIVEGFFDSPYFESDTNVKWVLHPHHIGESNIKTLWEDLNAIHSKYEEDIASLSEDKKEKRIKVYQGDVCQTINTYCEEVGKEAKTPLVQLLRYLYSRKDDIAVDKIIDGITFLSKKHKVEKQKINPVIQKYPSFNFGNNSKLLGKIISPKDKLKHNLKCNRNQVDNYIWIEIKVLNTKTMRWEKHHYALSSTRFLEEVYYPATSENPPDALAARFRTKTNGYEGKPALSAEQIEQIRSAPVGLRKVKKRQMRLEAARQQNLLPRYTWGKDFNINICKRGNNFEVTLATKVKKKKEKNYKVVLGYDANIVRKNTYAAIEAHANGDGVIDYNDLPVKPIESGFVTVESQVRDKSYDQLSYNGVKLLYCKPHVESRRSFLEKYRNGTMKDNRGNNIQIDFMKDFEAIADDETSLYYFNMKYCKLLQSSIRNHSSQAKEYREEIFELLRDGKLSVLKLSSLSNLSFVMFKVAKSLIGTYFGHLLKKPKNSKSDVKAPPITDEDKQKADPEMFALRLALEEKRLNKVKSKKEVIANKIVAKALELRDKYGPVLIKGENISDTTKKGKKSSTNSFLMDWLARGVANKVKEMVMMHQGLEFVEVNPNFTSHQDPFVHKNPENTFRARYSRCTPSELTEKNRKEILSFLSDKPSKRPTNAYYNEGAMAFLATYGLKKNDVLGVSLEKFKQIMANILHQRSEDQLLFPSRGGMFYLATYKLDADATSVNWNGKQFWVCNADLVAAYNVGLVDIQKDFKKK

SEQ ID NO: 7032 - protein, 1054 aa, synthetic construct
  REGION 1..1054: note = Synthetic
MSSAIKSYKSVLRPNERKNQLLKSTIQCLEDGSAFFFKMLQGLFGGITPEIVRFSTEQEKQQQDIALWCAVNWFRPVSQDSLTHTIASDNLVEKFEEYYGGTASDAIKQYFSASIGESYYWNDCRQQYYDLCRELGVEVSDLTHDLEILCREKCLAVATESNQNNSIISVLFGTGEKEDRSVKLRITKKILEAISNLKEIPKNVAPIQEIILNVAKATKETFRQVYAGNLGAPSTLEKFIAKDGQKEFDLKKLQTDLKKVIRGKSKERDWCCQEELRSYVEQNTIQYDLWAWGEMFNKAHTALKIKSTRNYNFAKQRLEQFKEIQSLNNLLVVKKLNDFFDSEFFSGEETYTICVHHLGGKDLSKLYKAWEDDPADPENAIVVLCDDLKNNFKKEPIRNILRYIFTIRQECSAQDILAAAKYNQQLDRYKSQKANPSVLGNQGFTWTNAVILPEKAQRNDRPNSLDLRIWLYLKLRHPDGRWKKHHIPFYDTRFFQEIYAAGNSPVDTCQFRTPRFGYHLPKLTDQTAIRVNKKHVKAAKTEARIRLAIQQGTLPVSNLKITEISATINSKGQVRIPVKFDVGRQKGTLQIGDRFCGYDQNQTASHAYSLWEVVKEGQYHKELGCFVRFISSGDIVSITENRGNQFDQLSYEGLAYPQYADWRKKASKFVSLWQITKKNKKKEIVTVEAKEKFDAICKYQPRLYKFNKEYAYLLRDIVRGKSLVELQQIRQEIFRFIEQDCGVTRLGSLSLSTLETVKAVKGIIYSYFSTALNASKNNPISDEQRKEFDPELFALLEKLELIRTRKKKQKVERIANSLIQTCLENNIKFIRGEGDLSTTNNATKKKANSRSMDWLARGVFNKIRQLAPMHNITLFGCGSLYTSHQDPLVHRNPDKAMKCRWAAIPVKDIGDWVLRKLSQNLRAKNIGTGEYYHQGVKEFLSHYELQDLEEELLKWRSDRKSNIPCWVLQNRLAEKLGNKEAVVYIPVRGGRIYFATHKVATGAVSIVFDQKQVWVCNADHVAAANIALTVKGIGEQSSDEENPDGSRIKLQLTS

SEQ ID NO: 7033-9000 - skipped (1968 entries)

SEQ ID NO: 9001 - DNA, 219 bp, synthetic construct
  misc_feature 1..219: note = Synthetic
  source 1..219: mol_type = other DNA
gagggcctatttcccatgattccttcatatttgcatatacgatacaaggctgttagagagataattggaattaatttgactgtaaacacaaagatataatttcttgggtagtttgcagttttaaaattatgttttaaaatggactatcatatgcttaccgtaacttgaaagtatttcgatttcttggctttatatatcttgtggaaaggacgaaacacc

SEQ ID NO: 9002 - DNA, 189 bp, synthetic construct
  misc_feature 1..189: note = Synthetic
  source 1..189: mol_type = other DNA
gagggcctatttcccatgattccttcatatttgcatatacgatacaaggctgttagagagataattggaattaatttgacgtttgcagttttaaaattatgttttaaaatggactatcatatgcttaccgtaacttgaaagtatttcgatttcttggctttatatatcttgtggaaaggacgaaacacc

SEQ ID NO: 9003 - DNA, 159 bp, synthetic construct
  misc_feature 1..159: note = Synthetic
  source 1..159: mol_type = other DNA
gagggcctatttcccatgattccttcatatttgcatatacgatacaaggctgttagagagataatattatgttttaaaatggactatcatatgcttaccgtaacttgaaagtatttcgatttcttggctttatatatcttgtggaaaggacgaaacacc

SEQ ID NO: 9004 - DNA, 129 bp, synthetic construct
  misc_feature 1..129: note = Synthetic
  source 1..129: mol_type = other DNA
gagggcctatttcccatgattccttcatatttgcatatacgatacaaggcggactatcatatgcttaccgtaacttgaaagtatttcgatttcttggctttatatatcttgtggaaaggacgaaacacc

SEQ ID NO: 9005 - skipped

SEQ ID NO: 9006 - DNA, 213 bp, synthetic construct
  misc_feature 1..213: note = Synthetic
  source 1..213: mol_type = other DNA
ctgcagtatttagcatgccccacccatctgcaaggcattctggatagtgtcaaaacagccggaaatcaagtccgtttatctcaaactttagcatttaaattagattttagttaaatttcctgctgaagctctagtacgataagcaacttgacctaagtgtaaagttgagacttccttcaggtttatatagcttgtgcgccgcttgggtacctc

SEQ ID NO: 9007 - DNA, 183 bp, synthetic construct
  misc_feature 1..183: note = Synthetic
  source 1..183: mol_type = other DNA
ctgcagtatttagcatgccccacccatctgcaaggcattctggatagtgtcaaaacagccggaaatcaagtccgtttatcttaaatttcctgctgaagctctagtacgataagcaacttgacctaagtgtaaagttgagacttccttcaggtttatatagcttgtgcgccgcttgggtacctc

SEQ ID NO: 9008 - DNA, 153 bp, synthetic construct
  misc_feature 1..153: note = Synthetic
  source 1..153: mol_type = other DNA
ctgcagtatttagcatgccccacccatctgcaaggcattctggatagtgtcaaaacagccggaaatagctctagtacgataagcaacttgacctaagtgtaaagttgagacttccttcaggtttatatagcttgtgcgccgcttgggtacctc

SEQ ID NO: 9009 - DNA, 123 bp, synthetic construct
  misc_feature 1..123: note = Synthetic
  source 1..123: mol_type = other DNA
ctgcagtatttagcatgccccacccatctgcaaggcattctggatagtgtcagcaacttgacctaagtgtaaagttgagacttccttcaggtttatatagcttgtgcgccgcttgggtacctc

SEQ ID NO: 9010-9013 - skipped (4 entries)

SEQ ID NO: 9014 - DNA, 3156 bp, synthetic construct
  misc_feature 1..3156: note = Synthetic
  source 1..3156: mol_type = other DNA
aagcgcaattacatcctgggcctggatatcggcatcacctccgtgggctacggcatcatcgactatgagacacgggatgtgatcgacgccggcgtgagactgttcaaggaggccaacgtggagaacaatgagggccggcggagcaagaggggagcaaggcgcctgaagcggagaaggcgccacagaatccagagagtgaagaagctgctgttcgattacaacctgctgaccgaccactccgagctgtctggcatcaatccttatgaggcccgggtgaagggcctgtcccagaagctgtctgaggaggagttttctgccgccctgctgcacctggcaaagaggagaggcgtgcacaacgtgaatgaggtggaggaggacaccggcaacgagctgagcacaaaggagcagatcagccgcaattccaaggccctggaggagaagtatgtggccgagctgcagctggagcggctgaagaaggatggcgaggtgaggggctccatcaatcgcttcaagacctctgactacgtgaaggaggccaagcagctgctgaaggtgcagaaggcctaccaccagctggatcagagctttatcgatacatatatcgacctgctggagaccaggcgcacatactatgagggaccaggagagggctcccccttcggctggaaggacatcaaggagtggtacgagatgctgatgggccactgcacctattttccagaggagctgagatccgtgaagtacgcctataacgccgatctgtacaacgccctgaatgacctgaacaacctggtcatcaccagggatgagaacgagaagctggagtactatgagaagttccagatcatcgagaacgtgttcaagcagaagaagaagcctacactgaagcagatcgccaaggagatcctggtgaacgaggaggacatcaagggctaccgcgtgaccagcacaggcaagccagagttcaccaatctgaaggtgtatcacgatatcaaggacatcacagcccggaaggagatcatcgagaacgccgagctgctggatcagatcgccaagatcctgaccatctatcagagctccgaggacatccaggaggagctgaccaacctgaatagcgagctgacacaggaggagatcgagcagatcagcaatctgaagggctacaccggcacacacaacctgtccctgaaggccatcaatctgatcctggatgagctgtggcacacaaacgacaatcagatcgccatctttaacaggctgaagctggtgccaaagaaggtggacctgagccagcagaaggagatcccaaccacactggtggacgatttcatcctgtcccccgtggtgaagcggagcttcatccagagcatcaaagtgatcaacgccatcatcaagaagtacggcctgcccaatgatatcatcatcgagctggccagggagaagaactctaaggacgcccagaagatgatcaatgagatgcagaagaggaaccgccagaccaatgagcggatcgaggagatcatcagaaccacaggcaaggagaacgccaagtacctgatcgagaagatcaagctgcacgatatgcaggagggcaagtgtctgtatagcctggaggccatccctctggaggacctgctgaacaatccattcaactacgaggtggatcacatcatcccccggagcgtgagcttcgacaattcctttaacaataaggtgctggtgaagcaggaggagaactctaagaagggcaataggacccctttccagtacctgtctagctccgattctaagatcagctacgagaccttcaagaagcacatcctgaatctggccaagggcaagggccgcatctctaagaccaagaaggagtacctgctggaggagcgggacatcaacagattcagcgtgcagaaggacttcatcaaccggaatctggtggacaccagatacgccacacgcggcctgatgaatctgctgcggtcctatttcagagtgaacaatctggatgtgaaggtgaagagcatcaacggcggcttcacctcctttctgcggagaaagtggaagtttaagaaggagagaaacaagggctataagcaccacgccgaggatgccctgatcatcgccaatgccgacttcatctttaaggagtggaagaagctggacaaggccaagaaagtgatggagaaccagatgttcgaggagaagcaggccgagagcatgcccgagatcgagaccgagcaggagtacaaggagattttcatcacacctcaccagatcaagcacatcaaggacttcaaggactacaagtattcccacagggtggataagaagcccaaccgcgagctgatcaatgacaccctgtattctacaaggaaggacgataagggcaataccctgatcgtgaacaatctgaacggcctgtacgacaaggataatgacaagctgaagaagctgatcaacaagagccccgagaagctgctgatgtaccaccacgatcctcagacatatcagaagctgaagctgatcatggagcagtacggcgacgagaagaacccactgtataagtactatgaggagaccggcaactacctgacaaagtattccaagaaggataatggccccgtgatcaagaagatcaagtactatggcaacaagctgaatgcccacctggacatcaccgacgattaccccaacagccggaataaggtggtgaagctgagcctgaagccatacaggttcgacgtgtacctggacaacggcgtgtataagtttgtgacagtgaagaatctggatgtgatcaagaaggagaactactatgaagtgaatagcaagtgctacgaggaggccaagaagctgaagaagatcagcaaccaggccgagttcatcgcctctttttacaacaatgacctgatcaagatcaatggcgagctgtatagagtgatcggcgtgaacaatgatctgctgaaccgcatcgaagtgaatatgatcgacatcacctaccgggagtatctggagaacatgaatgataagaggccccctcgcatcatcaagaccatcgcctctaagacacagagcatcaagaagtactctacagacatcctgggcaacctgtatgaggtgaagagcaagaagcaccctcagatcatcaagaagggc
